(19) United States
(12) Patent Application Publication
(10) Pub. No.: US 2024/0255525 A1
(43) Pub. Date: Aug. 1, 2024

(54) BIOMARKER FOR IN VITRO DIAGNOSIS AND/OR PROGNOSIS OF A SYSTEMIC INFLAMMATION

(71) Applicant: Universitätsklinikum Jena, Jena (DE)

(72) Inventors: Hortense SLEVOGT, Berlin (DE); Mario MÜLLER, Jena (DE)

(73) Assignee: Universitätsklinikum Jena, Jena (DE)

(21) Appl. No.: 18/286,064

(22) PCT Filed: Apr. 12, 2022
(86) PCT No.: PCT/EP2022/059707

§ 371 Date: Oct. 6, 2023

(30) Foreign Application Priority Data
Apr. 13, 2021 (EP) 21168225.7

(51) Int. Cl. G01N 33/68

(52) U.S. Cl. CPC G01N 33/6893; G01N 2333/70503; G01N 2800/26

(57) ABSTRACT

The present invention relates to the field of in vitro diagnosis of a systemic inflammation or prognosis of a risk of mortality of a subject with a systemic inflammation. In another aspect, the invention relates to the field of monitoring a systemic inflammation. The invention further relates to the use of a biomarker for in vitro diagnosing a systemic inflammation in a subject or prognosing a risk of mortality of a subject with a systemic inflammation. In particular, the biomarker is soluble V-set and immunoglobulin domain-containing protein 4 (sVSIG4). Preferably, the systemic inflammation is caused by an infectious agent, more preferably is a sepsis.

### FIELD OF THE INVENTION

[0001] The present invention relates to the field of in vitro diagnosis of a systemic inflammation or prognosis of a risk of mortality of a subject with a systemic inflammation. In another aspect, the invention relates to the field of monitoring a systemic inflammation. The invention further relates to the use of a biomarker for in vitro diagnosing a systemic inflammation in a subject or prognosing a risk of mortality of a subject with a systemic inflammation. Preferably, the systemic inflammation is caused by an infectious agent, more preferably is a sepsis.

[0002] The methods according to the invention also relate to the field of decision making processes regarding therapeutic interventions in subjects, in particular human subjects, suffering from a systemic inflammation, in particular from sepsis.

### BACKGROUND OF THE INVENTION

[0003] Systemic inflammations, in particular systemic inflammations caused by an infectious agent such as sepsis, represent a significant cause of mortality throughout the world. Specifically, sepsis is the third most common cause of death in Germany and other developed countries.

[0004] Sepsis typically occurs when pathogens, or the toxins they produce, spread from a localized site of inflammation throughout the body via the circulation, reaching distant organs and triggering a systemic inflammation. Systemic inflammation can lead to the failure of individual or several organs as well as multi-organ failure and, in the case of an additional severe drop in blood pressure, to septic shock. Hence, sepsis, severe sepsis or septic shock are typically caused by an infectious agent.

[0005] Septic shock is associated with a high lethality. An early diagnosis of a systemic inflammation, in particular of sepsis, followed by adequate therapeutic intervention, thus is critical for the therapeutic success and disease outcome.

[0006] However, systemic inflammation, in particular sepsis, is difficult to diagnose; an effective monitoring is challenging. Bloodstream infections, in particular bacteremia, and systemic infections are also a great challenge in diagnosis and therapy.

[0007] Microbiological methods, such as culturing of patient blood and subsequent identification of pathogens, are very time-consuming and not reliable due to a high incidence of false-negative results. Moreover, the interpretation of microbiological findings in critically ill patients is often problematic, because microorganisms may be detected that may merely represent colonizers, but are not necessarily indicative for a systemic inflammation caused by an infectious agent.

[0008] Biophysical detection methods, such as mass spectrometry, in particular matrix-assisted laser desorption ionization-time of flight mass spectrometry (MALDI-TOF MS), can also be used to detect a pathogen in a blood sample based on protein profiles characteristic for each pathogen. However, this method is usually done with blood samples that are pre-cultured at least for a short time. Moreover, this method is typically employed on positive blood cultures, i.e. requiring an additional method step before MALDI-TOF MS (Clin. Microbiol. Infect. 2020; 26:142-150).

[0009] By introducing molecular biological methods, such as PCR diagnostics, pathogens can be identified in biological samples in a targeted and partially parallelized manner. Pathogen detection in patient blood samples by PCR analysis is highly sensitive and specific, but sample preparation and measurement is time-consuming and in some cases can only be performed by highly experienced staff. Multiplex PCR can be used to perform multiple pathogen detections in parallel, but the number of measurements that can be performed in parallel is limited. Therefore, negative PCR results cannot exclude a present infection with a non-tested pathogen.

[0010] Markers known and used in clinical diagnostics that correlate with the strength of the systemic inflammation or with the severity of the infection are mainly procalcitonin (PCT), C-reactive protein (CRP) and interleukin-6 (IL-6) (Crit. Care 2020; 24(1):287; Anaesthesiol. Intensive Ther. 2019; 51:299-305) among others. PCT is detectable in the plasma of healthy individuals at low concentrations (below 0.1 ng/ml); under conditions of severe sepsis caused by bacteria, PCT concentrations can increase 5,000 to 10,000 fold. The increase in plasma PCT concentration is time-dependent and occurs quite rapidly after infection. PCT is detectable before an increase in CRP concentration, but appears more slowly than the upregulation of cytokines. However, major surgery, polytrauma, and cardiogenic shock may also result in markedly elevated plasma PCT concentrations due to a systemic inflammatory response, reducing the general applicability of PCT as a sepsis marker. In sum, current markers alone and even the combination of PCT and CRP are nonsatisfying for the diagnosis of systemic inflammations, in particular of sepsis, because their positive and negative predictive values are too low.

[0011] Other sepsis biomarkers have been described in the literature (Crit. Care 2020; 24(1):287), but most of them have not been fully verified or their validity is severely limited due to cohort studies with small case numbers, individual case studies, or lack of comparisons with PCT and CRP.

[0012] In summary, none of the current biomarkers allows for clear and unambiguous conclusions regarding a diagnosis of systemic inflammations, in particular of sepsis.

### SUMMARY OF THE INVENTION

[0013] Hence, it is an objective of the present invention to provide a biomarker for diagnosing a systemic inflammation or prognosing a risk of mortality of a subject with a systemic inflammation, in particular a systemic inflammation caused by an infectious agent, in particular a sepsis. It is furthermore an objective of the present invention to provide an improved biomarker or combination of biomarkers for such purposes.

[0014] In a particular aspect of the invention, it is an objective to provide a more reliable biomarker than the presently used biomarkers, such as PCT and CRP, specifically in view of the differentiation of systemic inflammation caused by an infectious agent, such as sepsis, and a systemic inflammation which is not caused by an infectious agent, such as SIRS.

[0015] The present invention as defined in the claims solves at least one of these objectives. In particular, at least one of these objects is solved by a method of in vitro diagnosing a systemic inflammation or prognosing a risk of mortality of a subject with a systemic inflammation, wherein the method comprises
[0016] a) determining the level of soluble V-set and immunoglobulin domain-containing protein 4 (sVSIG4) in a biological sample, and
[0017] b) drawing a conclusion as to the diagnosis of a systemic inflammation or the prognosis of a risk of mortality of a subject with a systemic inflammation from the presence and/or level of sVSIG4.

[0018] The inventors surprisingly identified that soluble V-set and immunoglobulin-containing protein 4 (sVSIG4), or combinations of sVSIG4 and other proteins and peptides in the biological sample, e.g. whole blood, plasma, and serum, can be used as a sole or supportive diagnostic criterion for a systemic inflammation. In particular, the sVSIG4 or combinations of sVSIG4 and other proteins and peptides can be used for in vitro diagnosis of a systemic inflammation caused by an infectious agent, such as sepsis, systemic infection or bloodstream infection, or a systemic inflammation not caused by an infectious agent, such as SIRS.

[0019] Hence, with the method according to the present invention, it is possible to reliably diagnose a systemic inflammation, in particular sepsis, by determining the level of sVSIG4 without the need of any other biomarker or diagnostic tool. The method is sensitive and specific. The method is fast and does not require culturing of a biological sample. It is an unbiased method in that no pre-diagnosis is necessary. It is also possible to combine the diagnosis with other biomarkers or diagnostic tools.

[0020] The method is performed in vitro in that it makes use of a biological sample which has previously been taken from the subject, for example a human patient.

[0021] The conclusion as to the diagnosis of a systemic inflammation or the prognosis of a risk of mortality from the presence and/or level of sVSIG4 can be drawn on basis of a cut-off level (a threshold) to indicate a systemic inflammation, in particular SIRS, bloodstream infection or sepsis. The conclusion can also be drawn on basis of differential expression between the biological samples of two subjects, for example one healthy subject and one subject with a suspected systemic inflammation, in particular sepsis.

[0022] The method allows identifying a subject with a systemic inflammation, in particular sepsis, at an early stage of the disease. This is particularly useful for the therapy decision. In addition, the method allows adapting the therapy in the course of infection if above steps a) and b) are repeated at least one time (monitoring). For example, if a high level of sVSIG4 is detected in a patient that has already been diagnosed with a sepsis, it is likely that a more aggressive therapy, for example in case of a bacterial pathogen as infectious agent a more aggressive antibiotic therapy or a different antibiotic therapy, is necessary.

[0023] In addition, the method allows prognosing a risk of mortality of a subject with a systemic inflammation. Thereby, individual patients can be subjected to targeted enhanced monitoring in order to detect complications in the course of the disease at an early stage. The determination of the concentration of sVSIG4 alone, or in combination with one or more other biomarkers, over time is also suitable for monitoring the effect of antimicrobial therapy through an increase or decrease in the level of the biomarkers.

[0024] The inventors have also found that biological samples from a subject, such as human plasma, can contain proteins at altered concentrations in the biological sample from patients with severe sepsis or septic shock and patients with systemic inflammatory response syndrome (SIRS) with or without organ dysfunction (collected according to sepsis-2 definition) with significantly different abundance or concentration in the two groups.

[0025] Thus, in a further aspect of the invention, a method of distinguishing between SIRS and sepsis in a subject is provided, wherein the method comprises:
[0026] a) determining the level of sVSIG4 in a biological sample of said subject, and
[0027] b) comparing the level of sVSIG4 in the biological sample with a reference level of sVSIG4 in a biological sample of a subject suffering from SIRS, wherein an increased level in the biological sample of step a) compared with the reference level of step b) indicates a sepsis in the subject of step a).

[0028] In a further aspect, a method of distinguishing between a systemic inflammation not caused by an infectious agent (i.e. a sterile systemic inflammation) and bacteremia in a subject is provided, wherein the method comprises:
[0029] a) determining the level of sVSIG4 in a biological sample of said subject, and
[0030] b) comparing the level of sVSIG4 in the biological sample with a reference level of sVSIG4 in a biological sample of a subject suffering from sterile systemic inflammation,

[0031] wherein an increased level in the biological sample of step a) compared with the reference level of step b) indicates bacteremia in the subject of step a).

[0032] According to another aspect of the invention, the invention relates to an antibiotic agent for use in a method of treating an infection in a subject or treating a subject with a suspected infection, wherein the infection is part of a bloodstream infection, systemic infection or sepsis and wherein the bloodstream infection, systemic infection or sepsis is diagnosed or monitored by the level of sVSIG4 in a biological sample. Thereby, therapy can be individualized and adapted according to the subject's need.

[0033] According to a further aspect of the invention, sVSIG4 is used as a biomarker for in vitro diagnosing a systemic inflammation in a subject or prognosing a risk of mortality of a subject with a systemic inflammation. sVSIG4 can be used as a sole biomarker or as a biomarker in combination with other biomarkers or diagnostic tools.

[0034] According to yet a further aspect of the invention, a kit is provided comprising a binding molecule to sVSIG4 and a binding molecule to at least one further biomarker for the quantitative detection of sVSIG4 and the at least one further biomarker.

[0035] Other objects, features, advantages and aspects of the present application will become apparent to those skilled in the art from the following description and appended claims. It should be understood, however, that the following description, appended claims, and specific examples, while indicating preferred embodiments of the application, are given by way of illustration only.

### BRIEF DESCRIPTION OF THE FIGURES

[0036] FIG. 1: Experimental design. Proteomic workflow for the analysis of plasma samples of SIRS and sepsis patients. Glycoproteins were captured on sepharose beads by hydrazide chemistry, on bead digested with trypsin, and N-glycopeptides were released with PNGaseF. Tryptic peptides and former N-glycopeptides were analyzed individually by LC-MS/MS. Peptide identification and protein inference was done in MaxQuant and statistical analysis was done with Perseus.

[0037] FIG. 2: Proteomic identification and reproducible quantification among the patient samples from the discovery cohort. A: Number of peptides and proteins identified in 264 individual plasma samples of patients. B: Frequency of glycoprotein identifications in plasma from SIRS and sepsis patients. C: Plasma protein concentration range in the data set. Plasma proteins identified with 100% (black), 95% (dark grey), 90% (medium grey) and 50% (light grey) reproducibility in the proteomic data set compared to plasma protein concentration data compiled at The Human Protein Atlas (light grey). D: Reproducibility of the LFQ intensities of five proteins detected in 100% of all samples covering nearly five orders of magnitude. Plotted are values of Alpha-1-antitrypsin (A1AT, gene name SERPINA1), Clusterin (CLUS, gene name CLU), Alpha-2-antiplasmin (A2AP, gene name SERPINF2), Coagulation factor XI (FA11, gene name F11), and N-acetylglucosamine-1-phosphotransferase subunit gamma (GNPTG, gene name GNPTG). E: Distribution of the fold changes of glycoprotein LFQ intensities from their average abundance levels across the cohort is shown in box plots and outliers. Shown are glycoproteins identified with 100% reproducibility and sorted according to their average intensity level (decreasing from left to right).

[0038] FIG. 3: Differential expression of plasma proteins in SIRS and sepsis patients of the discovery cohort. A: Principle component analysis of the proteomic data set. The first component explains 7.12% of the variation in the data set. In light grey: SIRS patients and in dark grey: sepsis patients. B: Volcano plot of differentially abundant proteins in SIRS and sepsis patients. The t-test p-value is plotted against the abundance fold change of all identified proteins with identifications in minimum 10 patients. Data points of the lower center area of the plot (grey, open circles) indicate proteins with unchanged or with no significant fold change, whereas data points in the upper left and upper right quadrants indicate proteins (black and grey filled circles) with significant (FDR less than 0.05 (Benjamini-Hochberg adjusted) lesser abundance in the sepsis group (left) or significantly higher abundance in the sepsis group (right). Black circles display plasma proteins with fold changes ≥2 and grey circles display significant differentially abundant proteins with FC<2.

[0039] FIG. 4: Differential abundance of plasma proteins in SIRS and sepsis patients of the validation cohort. Volcano plot of differentially abundant proteins in SIRS and sepsis patients. The t-test p-value is plotted against the abundance fold change of all identified proteins with identifications in minimum 10 patients. Data points of the lower center area of the plot (grey, open circles) indicate proteins with unchanged or with no significant fold change, whereas data points in the upper left and upper right quadrants indicate proteins (light grey and dark grey filled circles) with significant (FDR less than 0.05 (Benjamini-Hochberg adjusted) lesser abundance in the sepsis group (left) or significant higher abundance in the sepsis group (right). Red circles display plasma proteins with fold changes ≥2 and grey circles display significant differentially abundant proteins with FC<2.

[0040] FIG. 5: Overlap between significant differentially abundant plasma proteins in SIRS and sepsis patients identified in the discovery cohort (left) and in the validation cohort (right) depicted as Venn diagrams. A: Overlap between all significant plasma proteins identified in both cohorts. B+C: Overlap between plasma proteins with significant higher (B) or lower (C) plasma levels in sepsis patients.

[0041] FIG. 6: A+B: Receiver operating characteristics curves (ROC) of the 24 best performing plasma proteins in the discovery cohort data set for the discrimination between SIRS and sepsis. A left: bar diagram depicting area under the curve (AUC) values for plasma proteins identified in the proteomic data set (discovery cohort) and PCT and CRP (dark grey) values from the clinic. Plots depict ROC curves for the given proteins and their characteristics in the discovery cohort (DC, black) and validation cohort (VC, grey). For simplicity gene names are given ITHIH1=Inter-alpha-trypsin inhibitor heavy chain H1, ITIH2=Inter-alpha-trypsin inhibitor heavy chain H2, GPLD1=Phosphatidylinositol-glycan-specific phospholipase D, PGLYRP2=N-acetylmuramoyl-L-alanine amidase, SERPINA4=Kallistatin, VSIG4=soluble V-set and immunoglobulin domain-containing protein 4, AHSG=Alpha-2-HS-glycoprotein, ITIH3=Inter-alpha-trypsin inhibitor heavy chain H3, AFM=Afamin, MRC1=Macrophage mannose receptor 1, BCHE=Cholinesterase, IGFALS=Insulin-like growth factor-binding protein complex acid labile subunit, TF=Serotransferrin, crp.day.sample=CRP measured in the clinics at sampling day, LCAT=Phosphatidylcholine-sterol acyltransferase, CNDP1=Beta-Ala-His dipeptidase, KLKB1=Plasma kallikrein, SERPINA3=Alpha-1-antichymotrypsin, CD14=Monocyte differentiation antigen CD14, LCN2=Neutrophil gelatinase-associated lipocalin, HGFAC=Hepatocyte growth factor activator, CD163=Scavenger receptor cysteine-rich type 1 protein M130, FN1.15=Fibronectin, isoform 15, HRG=Heme transporter HRG1, SERPINA1=Alpha-1-antitrypsin, PCT.day.sample=PCT measured in the clinics at sampling day

[0042] FIG. 7: Receiver operating characteristics curves for the combination of the 24 best performing plasma proteins (A) discriminating between SIRS and sepsis patients demonstrating an FC of at least two which were selected for a linear discrimination analysis. In each step of a backward elimination process the protein with the least contribution to the LDA's resulting predictor was eliminated from the list until the list contained only four (B), three (C), or two (D) proteins: Phosphatidylinositol-glycan-specific phospholipase D (GPLD1) and soluble V-set and immunoglobulin domain-containing protein 4 (VSIG4). The linear combination of these two proteins (LDA) was selected as a new predictor. (E): x-y plot of the linear predictor derived from GPLD1 and sVSIG4 (black open circles: sepsis patients, black filled circles: sepsis patients who died from sepsis; grey open circles SIRS patients, filled grey circles: SIRS patients who died from sepsis), and (F) scatter plot of the distribution of SIRS and sepsis patients with the linear predictor derived from proteomic results for GPLD1 and sVSIG4. For simplicity gene names are given: GPLD1=Phosphatidylinositol-glycan-specific phospholipase D, SERPINA4=Kallistatin, VSIG4=soluble V-set and immunoglobulin domain-containing protein 4, AHSG=Alpha-2-HS-glycoprotein, AFM=Afamin, MRC1=Macrophage mannose receptor 1, BCHE=Cholinesterase, IGFALS=Insulin-like growth factor-binding protein complex acid labile subunit, CNDP1=Beta-Ala-His dipeptidase, LCN2=Neutrophil gelatinase-associated lipocalin, CD163=Scavenger receptor cysteine-rich type 1 protein M130, SERPINA5=Plasma serine protease inhibitor, LRG1=Leucine-rich alpha-2-glycoprotein, CRP=C-reactive protein, REG1A=Lithostathin-1-alpha, LBP=Lipopolysaccharide-binding protein, LYVE1=Lymphatic vessel endothelial hyaluronic acid receptor 1, IGFBP3=Insulin-like growth factor-binding protein 3, CR2=Complement receptor type 2, FN1=Fibronectin, ASGR2=Asialoglycoprotein receptor 2, ALPL=Alkaline phosphatase, tissue-nonspecific isozyme, SAA2=Serum amyloid A-2 protein, DPP4=Dipeptidyl peptidase 4.

[0043] FIG. 8: Receiver operating characteristics curves for the combination of the 24 best performing plasma proteins (A) discriminating between SIRS and sepsis patients (no FC criterion) that were selected for a linear discrimination analysis. In each step of a backward elimination process the protein with the least contribution to the LDA's resulting predictor was eliminated from the list until the list contained only four (B), three (C), or two proteins (D): Inter-alpha-trypsin inhibitor heavy chain H1 (ITIH2) and soluble V-set and immunoglobulin domain-containing protein 4 (VSIG4). The linear combination of these two proteins (LDA) was selected as a new predictor. (E) x-y plot of the linear predictor derived from ITIH2 and sVSIG4 (black open circles: sepsis patients, black filled circles: sepsis patients who died from sepsis; grey open circles SIRS patients, filled grey circles: SIRS patients who died from sepsis), and (F) scatter plot of the distribution of SIRS and sepsis patients with the linear predictor derived from proteomic results for ITIH2 and sVSIG4. For simplicity gene names are given: ITHIH2=Inter-alpha-trypsin inhibitor heavy chain H2, ITIH1=Inter-alpha-trypsin inhibitor heavy chain H1, GPLD1=Phosphatidylinositol-glycan-specific phospholipase D, PGLYRP2=N-acetylmuramoyl-L-alanine amidase, SERPINA4=Kallistatin, VSIG4=soluble V-set and immunoglobulin domain-containing protein 4, AHSG=Alpha-2-HS-glycoprotein, ITIH3=Inter-alpha-trypsin inhibitor heavy chain H3, AFM=Afamin, MRC1=Macrophage mannose receptor 1, BCHE=Cholinesterase, IGFALS=Insulin-like growth factor-binding protein complex acid labile subunit, TF=Serotransferrin, LCAT=Phosphatidylcholine-sterol acyltransferase, CNDP1=Beta-Ala-His dipeptidase, KLKB1=Plasma kallikrein, SERPINA3=Alpha-1-antichymotrypsin, CD14=Monocyte differentiation antigen CD14, LCN2=Neutrophil gelatinase-associated lipocalin, HGFAC=Hepatocyte growth factor activator, CD163=Scavenger receptor cysteine-rich type 1 protein M130, FN1.15=Fibronectin, isoform 15, HRG=Heme transporter HRG1, SERPINA1=Alpha-1-antitrypsin.

[0044] FIG. 9: Differential abundance of plasma proteins in patients with microbiological culture proven positive or culture negative results of the discovery cohort in comparison to plasma proteins detected with differential abundance in the sepsis patient group. A: Volcano plot of differentially abundant proteins in patients with positive or negative (SIRS and sepsis) culture results. The t-test p-value is plotted against the abundance fold change of all identified proteins with identifications in minimum 10 patients. Data points of the lower center area of the plot (grey, open circles) indicate proteins with unchanged or with no significant fold change, whereas data points in the upper left and upper right quadrants indicate proteins (black and grey filled circles) with significant (FDR less than 0.05 (Benjamini-Hochberg adjusted) lesser abundance (left) or significant higher abundance in the culture positive patient group (right). Black filled circles display plasma proteins with fold changes ≥2 and grey filled circles display significant differentially abundant proteins with FC<2. B: Overlap of significant differential abundant plasma proteins of the comparisons SIRS versus sepsis patients (right) and microbiological positive versus negative (left) results depicted in a Venn diagram. C+D: Overlap between plasma proteins with higher (C) levels in microbiological culture positive (left) and higher levels in sepsis patients and (D) plasma proteins detected at lesser abundance in patients with microbiological culture positive results and lesser abundance in the sepsis patient group.

[0045] FIG. 10: Plasma protein abundance in septic patients with gram-negative or gram-positive bacteremia detected by culture methods (A) and with primary infection focus in the respiratory tract or abdominal (B). A+B: Volcano plots of differentially abundant proteins. The t-test p-value is plotted against the abundance fold change of all identified proteins with identifications in minimum 10 patients. Data points of the lower center area of the plot (grey, open circles) indicate proteins with unchanged or with no significant fold change, whereas data points in the upper left and upper right quadrants indicate proteins (black and grey filled circles) with significant (FDR less than 0.05 (Benjamini-Hochberg adjusted) lesser abundance (left) or significant higher abundance in the comparisons gram-positive (right) versus gram-negative (left) group or proteins higher abundant in the patient group with abdominal focus (left) and respiratory tract focus (right), respectively. Black filled circles display plasma proteins with fold changes ≥2 and filled grey circles display significant differentially abundant proteins with FC<2. Note the absence of significant proteins in the gram-negative versus gram-positive contrast. Highlighted are proteins TIMP1, MMP9, MMP8 and sVSIG4 with high abundance in patients with abdominal focus and NEGR1 with high abundance in patients with respiratory focus.

[0046] FIG. 11: Differential plasma protein abundance at day 1 and day 2 in patients who survive or patients to die of sepsis. A+B: Volcano plots of differentially abundant plasma proteins in the (A) discovery cohort and (B) validation cohort. The t-test p-value is plotted against the abundance fold change of all identified proteins with identifications in minimum 10 patients. Data points of the lower center area of the plot (grey, open circles) indicate proteins with unchanged or with no significant fold change, whereas data points in the upper left and upper right quadrants indicate proteins (black and grey filled circles) with significant (FDR less than 0.05 (Benjamini-Hochberg adjusted) lesser abundance (left) or significant higher abundance in patients to die of sepsis (deceased). Black filled circles display plasma proteins with significant fold changes ≥2 and filled grey circles display significant differentially abundant proteins with FC<2.

[0047] FIG. 12: A-C: Receiver operating characteristics (ROC) curves of 25 best performing plasma proteins in the data set of the discovery cohort for discriminating survivors and patients to die of sepsis. A left: bar diagram depicting area under the curve (AUC) values for plasma proteins identified in the proteomic data set and PCT and CRP (dark grey) values from the clinic. Plots depict ROC curves for the given proteins and their characteristics in the discovery cohort (black) and CRP (grey line) or PCT (dotted grey line). For simplicity gene names are given: VSIG4=soluble V-set and immunoglobulin domain-containing protein 4, CD163=Scavenger receptor cysteine-rich type 1 protein M130, SERPINA4=Kallistatin, MRC1=Macrophage mannose receptor LYVE1=Lymphatic vessel endothelial hyaluronic acid receptor 1, BCHE=Cholinesterase, RNASE1=Ribonuclease pancreatic, GPLD1=Phosphatidylinositol-glycan-specific phospholipase D, AFM=Afamin, IGFALS=Insulin-like growth factor-binding protein complex acid labile subunit, LCN2=Neutrophil gelatinase-associated lipocalin, PIK3IP1=Phosphoinositide-3-kinase-interacting protein 1, AHSG=Alpha-2-HS-glycoprotein, GM2A=Ganglioside GM2 activator, CNDP1=Beta-Ala-His dipeptidase, PILRA=Paired immunoglobulin-like type 2 receptor alpha, CD177=CD177 antigen, ATP6AP1=V-type proton ATPase subunit S1, SERPINA5=Plasma serine protease inhibitor, FSTL3=Follistatin-related protein 3, SFTPB=Pulmonary surfactant-associated protein B, TNFRSF1B=Tumor necrosis factor receptor superfamily member 1B, WFDC2=WAP four-disulfide core domain protein 2, ALPL=Alkaline phosphatase, tissue-nonspecific isozyme, TIMP1=Metalloproteinase inhibitor 1, crp.day.sample and PCT.day.sample=CRP and PCT measured in the clinics at sampling day.

[0048] FIG. 13: A-C: Receiver operating characteristics curves (ROC) of sVSIG4 measured by ELISA and clinical parameters of patients of the discovery cohort. A left: bar diagram depicting area under the curve (AUC) values for plasma proteins identified in the proteomic data set and PCT and CRP (dark grey) values from the clinic. Plots depict ROC curves for the given proteins and their characteristics in the discovery cohort (black) and CRP (grey line) or PCT (dotted grey line).

[0049] FIG. 14: Soluble VSIG4 detection in plasma samples with ELISA. Plasma samples from SIRS and sepsis patients of the discovery and validation cohort were diluted and detected with a sandwich ELISA against human VSIG4 protein. A: Detection of sVSIG4 in SIRS and sepsis patient samples of the discovery cohort (264) and validation cohort (96) (***=p<0.0001). B: Plasma level of sVSIG4 in the subgroups SIRS, SIRS+Organdysfunction (OD), sepsis, severe sepsis and septic shock of both cohorts (***=p<0.001). C: Plasma levels of sVSIG4 in microbiological positive (MiBi+) and negative plasma samples (no). (****=p<0.001). D: sVSIG4 plasma levels in sepsis patients with abdominal focus or focus in the respiratory tract (*=p<0.0139). E: sVSIG4 levels in patients (SIRS and sepsis) with SOFA-score≤6 or SOFA-score ≥7 (****=p<0.0001). F: sVSIG4 level in plasma at day 1 or day 2 after diagnosis in patients, who survived, died of sepsis or died of other reasons (****=p<0.0001).

[0050] FIG. 15: Correlation of sVSIG4 (ELISA) with CRP and PCT at sampling day. x-y plots of sVSIG4 and CRP (A-C) or PCT (D-E) concentrations. A and D: sVSIG4 correlations in all patients of the discovery cohort, B and E: sVSIG4 correlation in SIRS patients and C and F: correlation of sVSIG in sepsis patients.

[0051] FIG. 16: Sepsis prediction with soluble V-set and immunoglobulin domain-containing protein 4 (sVSIG4), Phosphatidylinositol-glycan-specific phospholipase D (GPLD1), C-reactive protein (CRP) and sVSIG4-linear combinations with GPLD1, CRP and Myeloblastin (PRTN3). Sensitivity, specificity, cut-off values (sensitivity=specificity), and AUC of biomarkers for sepsis diagnosis. A: Proteomic data for sVSIG4 alone. B: sVSIG4 ELISA data alone. C: Phosphatidylinositol-glycan-specific phospholipase D (GPLD1) proteomic data alone. D: CRP-values measured in the clinic alone. E: linear combination of sVSIG4 and GPLD1 proteomic data. F: linear combination of sVSIG4 (ELISA data) and CRP clinical data. G: Linear combination of sVSIG4 (ELISA data) and PRTN3.

[0052] FIG. 17: Soluble VSIG4 detection in plasma samples with ELISA. CRP (A), PCT (B), SOFA-score (C) and sVSIG4 (D) levels in sepsis patients, septic shock patients and healthy controls in a cohort collected and grouped according to Sepsis-3 definition.

### DETAILED DESCRIPTION OF THE INVENTION

[0053] There is currently no parameter that alone can lead to the diagnosis of a systemic inflammation, in particular of SIRS, a bloodstream infection, a systemic infection or sepsis. A combination of laboratory values, hemodynamic data, and organ function, as well as (historically) other vital signs, are included to make the diagnosis. Even the prerequisite of a sepsis diagnosis, documented or suspected infection, cannot currently be clearly described by a single parameter (laboratory value or vital sign) alone. Furthermore, critically ill patients may also have organ dysfunction that need not be causally related to infection. Therefore, there is a continuous need for reliable methods for early diagnosis of systemic inflammation, in particular for diagnosing or prognosing sepsis.

[0054] The present invention provides a method of in vitro diagnosing a systemic inflammation or prognosing a risk of mortality of a subject with a systemic inflammation, in particular a systemic inflammation caused by an infectious agent, in particular sepsis. In particular, the protein-based biomarker soluble V-set and immunoglobulin domain-containing protein 4 (sVSIG4) allows for early detection of a systemically spreading infection. The protein-based biomarker is advantageously readily available in biological samples, such as body fluids, and can be directly measured, as the biomarker is soluble in said biological sample.

[0055] In a first aspect of the invention, a method of in vitro diagnosing a systemic inflammation or prognosing a risk of mortality of a subject with a systemic inflammation is provided, wherein the method comprises
[0056] a) determining the level of soluble V-set and immunoglobulin domain-containing protein 4 (sVSIG4) in a biological sample, and
[0057] b) drawing a conclusion as to the diagnosis of a systemic inflammation or the prognosis of a risk of mortality of a subject with a systemic inflammation from the presence and/or level of sVSIG4.

[0058] “In vitro Diagnosis” according to the present invention refers to a diagnosis that does not require the presence of the subject to be diagnosed because the biological sample has previously been obtained from the subject. Subsequently, the biological sample can be analyzed, i.e. the level of sVSIG4 can be determined, in the absence of the subject.

[0059] VSIG4 (V-set and immunoglobulin domain containing 4) is also known as complement receptor of the immunoglobulin superfamily (CRIg) and Z39lg. VSIG4 is a type I transmembrane glycoprotein, O-glycosylated on extracellular threonin-264. It is a B7 family-related protein and an Ig superfamily member. It is involved in phagocytic processes on macrophages and is a strong negative regulator of T-cell proliferation. VSIG4 is a potent inhibitor of the alternative complement pathway convertases. VSIG4 contains an extracellular domain which comprises Ig-like domain 1 (SEQ ID NO: 4), or lg-like domain 1 (SEQ ID NO: 4) and Ig-like domain 2 (SEQ ID NO: 5), and further a transmembrane domain and a cytoplasmic domain.

[0060] VSIG4 is particularly selected from the group consisting of VSIG4 isoform 1 (UniProt Identifier Q9Y279-1), VSIG4 isoform 2 (UniProt Identifier Q9Y279-2) and VSIG4 isoform 3 (UniProt Identifier Q9Y279-3) or has an amino acid sequence which is at least 90% identical to the amino acid sequence of VSIG4 isoform 1 (UniProt Identifier Q9Y279-1), VSIG4 isoform 2 (UniProt Identifier Q9Y279-2) or VSIG4 isoform 3 (UniProt Identifier Q9Y279-3).

TABLE 1
UniProt Identifiers and sequences of VSIG4 isoforms. Sequences were retrieved
from the UniProt Database with release number 2021_01.

| | UniProt | | SEQ ID |
|---|---|---|---|
| Name | Identifier | Sequence | NO: |
| VSIG4 | Q9Y279-1 | MGILLGLLLLGHLTVDTYGRPILEVPESVTGPWKGDV | 1 |
| isoform | | NLPCTYDPLQGYTQVLVKWLVQRGSDPVTIFLRDSS | |
| 1 | | GDHIQQAKYQGRLHVSHKVPGDVSLQLSTLEMDDRS | |
| | | HYTCEVTWQTPDGNQVVRDKITELRVQKLSVSKPTV | |
| | | TTGSGYGFTVPQGMRISLQCQARGSPPISYIWYKQQ | |
| | | TNNQEPIKVATLSTLLFKPAVIADSGSYFCTAKGQVGS | |
| | | EQHSDIVKFVVKDSSKLLKTKTEAPTTMTYPLKATSTV | |
| | | KQSWDWTTDMDGYLGETSAGPGKSLPVFAIILIISLCC | |
| | | MVVFTMAYIMLCRKTSQQEHVYEAARAHAREANDSG | |
| | | ETMRVAIFASGCSSDEPTSQNLGNNYSDEPCIGQEY | |
| | | QIIAQINGNYARLLDTVPLDYEFLATEGKSVC | |
| VSIG4 | Q9Y279-2 | MGILLGLLLLGHLTVDTYGRPILEVPESVTGPWKGDV | 2 |
| isoform | | NLPCTYDPLQGYTQVLVKWLVQRGSDPVTIFLRDSS | |
| 2 | | GDHIQQAKYQGRLHVSHKVPGDVSLQLSTLEMDDRS | |
| | | HYTCEVTWQTPDGNQVVRDKITELRVQKLSVSKPTV | |
| | | TTGSGYGFTVPQGMRISLQCQARGSPPISYIWYKQQ | |
| | | TNNQEPIKVATLSTLLFKPAVIADSGSYFCTAKGQVGS | |
| | | EQHSDIVKFVVKDSSKLLKTKTEAPTTMTYPLKATSTV | |
| | | KQSWDWTTDMDGYLGETSAGPGKSLPVFAIILIISLCC | |
| | | MVVFTMAYIMLCRKTSQQEHVYEAAR | |
| VSIG4 | Q9Y279-3 | MGILLGLLLLGHLTVDTYGRPILEVPESVTGPWKGDV | 3 |
| isoform | | NLPCTYDPLQGYTQVLVKWLVQRGSDPVTIFLRDSS | |
| 3 | | GDHIQQAKYQGRLHVSHKVPGDVSLQLSTLEMDDRS | |
| | | HYTCEVTWQTPDGNQVVRDKITELRVQKHSSKLLKT | |
| | | KTEAPTTMTYPLKATSTVKQSWDWTTDMDGYLGETS | |
| | | AGPGKSLPVFAIILIISLCCMVVFTMAYIMLCRKTSQQE | |
| | | HVYEAARAHAREANDSGETMRVAIFASGCSSDEPTS | |
| | | QNLGNNYSDEPCIGQEYQIIAQINGNYARLLDTVPLDY | |
| | | EFLATEGKSVC | |

[0061] Isoform 2 misses amino acids 322 to 399 of isoform 1. In Isoform 3 amino acids 138 to 232 of isoform 1 are replaced by histidine (H). The extracellular Ig-like domain 1 (SEQ ID NO: 4) encompasses amino acid 21 to 131 of either isoform. The extracellular Ig-like domain 2 (SEQ ID NO: 5) encompasses amino acids 143-226 of isoform 1 and isoform 2 and is missing in isoform 3.

TABLE 2
Sequences of Ig-like domain 1, Ig-like domain 2, extracellular domain,
transmembrane domain and cytoplasmic domain of VSIG4.

| | | No. of | |
|---|---|---|---|
| | | amino | |
| | | acids of | |
| | | VSIG4 | SEQ ID |
| Name | Sequence | isoform 1 | NO: |
| Ig-like domain 1 | PILEVPESVTGPWKGDVNLPCTYDPLQGYTQV | 21-131 | 4 |
| | LVKWLVQRGSDPVTIFLRDSSGDHIQQAKYQG | | |
| | RLHVSHKVPGDVSLQLSTLEMDDRSHYTCEV | | |
| | TWQTPDGNQVVRDKIT | | |
| Ig-like domain 2 | PTVTTGSGYGFTVPQGMRISLQCQARGSPPIS | 143-226 | 5 |
| | YIWYKQQTNNQEPIKVATLSTLLFKPAVIADSG | | |
| | SYFCTAKGQVGSEQHSDIV | | |
| Extracellular | RPILEVPESVTGPWKGDVNLPCTYDPLQGYTQ | 20-283 | 6 |
| domain | VLVKWLVQRGSDPVTIFLRDSSGDHIQQAKYQ | | |
| | GRLHVSHKVPGDVSLQLSTLEMDDRSHYTCE | | |
| | VTWQTPDGNQVVRDKITELRVQKLSVSKPTVT | | |
| | TGSGYGFTVPQGMRISLQCQARGSPPISYIWY | | |
| | KQQTNNQEPIKVATLSTLLFKPAVIADSGSYFC | | |
| | TAKGQVGSEQHSDIVKFVVKDSSKLLKTKTEA | | |
| | PTTMTYPLKATSTVKQSWDWTTDMDGYLGET | | |
| | SAGPGKSLP | | |
| Transmembrane | VFAIILIISLCCMVVFTMAYI | 284-304 | 7 |
| domain | | | |
| Cytoplasmic | MLCRKTSQQEHVYEAARAHAREANDSGETM | 305-399 | 8 |
| domain | RVAIFASGCSSDEPTSQNLGNNYSDEPCIGQE | | |
| | YQIIAQINGNYARLLDTVPLDYEFLATEGKSVC | | |

[0062] The protein soluble VSIG4 (sVSIG4) preferably comprises the extracellular domain or a fragment of the extracellular domain of VSIG4. In another preferred embodiment, sVSIG4 does not comprise the transmembrane domain and cytoplasmic domain of VSIG4. In a particular embodiment, sVSIG4 comprises the extracellular domain or a fragment of the extracellular domain of VSIG4 and does not comprise the transmembrane domain and cytoplasmic domain of VSIG4.

[0063] sVSIG4 is a soluble protein, i.e. sVSIG4 is a free protein which is preferably not bound to a cell or integrated into a membrane, such as a cell membrane. sVSIG4 is preferably soluble in plasma, in particular in human plasma. In a preferred embodiment, sVSIG4 is dissolved in the biological sample, in particular in the non-cellular fraction of the biological sample. Thus, sVSIG4 can be detected in a cell-free or cell-depleted biological sample.

[0064] Preferably, the extracellular domain comprises Ig-like domain 1 (SEQ ID NO: 4), or lg-like domain 1 (SEQ ID NO: 4) and Ig-like domain-2 (SEQ ID NO: 5). In another preferred embodiment, the extracellular domain comprises the sequence as defined in SEQ ID NO: 6 which comprises Ig-like domain 1 (SEQ ID NO: 4) and Ig-like domain-2 (SEQ ID NO: 5) and a first linker region between Ig-like domain 1 (SEQ ID NO: 4) and Ig-like domain-2 (SEQ ID NO: 5) and a second linker region after Ig-like domain 2 (SEQ ID NO: 5).

[0065] Determining a “level” of sVSIG4 or any other biomarker is synonymous with determining the concentration of sVSIG4 or such other biomarker in the biological sample. The level can be determined with various methods as further explained infra.

[0066] “Systemic Inflammation” according to the present invention refers to a systemic response of a subject, preferably a human subject, to a harmful stimulus. The harmful stimulus is for example an infectious agent, i.e. a pathogen. The harmful stimulus may also be a trauma, polytrauma or severe burns. In that case the systemic inflammation is not caused by an infectious agent. The response typically involves a strong reaction of the subject's immune system including the release of cytokines from immune cells, to result in a systemic reaction (as opposed to a local reaction) of the subject.

[0067] “Infection” refers to the invasion of a subject by an infectious agent, i.e. pathogens. Hence, a systemic inflammation may be caused by an infectious agent. Infectious agents, i.e. pathogens, may be bacteria, viruses or fungi, in particular bacteria or viruses. It is also possible that more than one type of pathogen infects the subject, for example an infection by bacteria and fungi.

[0068] The systemic inflammation caused by an infectious agent is preferably a sepsis, a systemic infection, or a bloodstream infection, more preferably a sepsis.

[0069] The systemic inflammation may also be not caused by an infectious agent. This is typically referred to as a sterile systemic inflammation and means that no infectious agent was detectable. Preferably, the systemic inflammation not caused by an infectious agent is a medical condition called systemic inflammatory reaction syndrome (SIRS). SIRS is characterized by a systemic reaction of a subject.

[0070] “Systemic infection” is an infection which has started locally but subsequently has spread across the organs of the subject. Hence, systemic infections in a human typically involve different parts of the body or more than one body system at the same time.

[0071] “Bloodstream infection” refers to an infection present in the blood. Bloodstream infections typically occur when a pathogen enters the bloodstream during surgery or due to foreign bodies, such as catheters or cardiac valves. Bloodstream infections include bacteremias, viremias and fungemias, depending on the pathogen (bacteria, viruses or fungi, respectively). Bacteremias are most common.

[0072] “Sepsis” can be defined in several ways. According to the “sepsis-2 definition” (Int. Arch. Allergy Appl. Immunol. 1984; 73:97-103), an excessive inflammatory response including a so-called cytokine storm is held responsible for the pathogenesis of sepsis. A SIRS with suspected or proven infection is referred to as sepsis. The German Sepsis Society lists four SIRS criteria in its sepsis definition in addition to the requirement of documented or suspected infection: (1) fever)(≥38.0° ° C. or hypothermia (≤36.0° C.), (2) tachycardia (heart rate ≥90/min), (3) tachypnea (respiratory rate ≥20/min) or hyperventilation (confirmed by taking an arterial blood gas analysis with PaCO2≤4.3 kPa or 33 mmHg), (4) leukocytosis (≥ 12,000/mm³) or leukopenia (≤4,000/mm³), or more than 10% immature neutrophils on differential blood count.

[0073] “Severe sepsis” according to the sepsis-2 definition is referred to a medical condition wherein one or more organs fail. If this event also results in an extreme drop in blood pressure, in which the heart can no longer pump the blood through severely dilated blood vessels despite sufficient administration of fluids, and vasopressors are needed this is referred to as “septic shock”.

[0074] In the sense of the present invention, the term “sepsis” includes “severe sepsis” and “septic shock” unless specified separately.

[0075] The “sepsis-3 definition” (JAMA 2016; 315:801-10; JAMA 2016; 315:775-87) replaces the SIRS criteria with an empirical, data-based, and evidence-driven definition of sepsis. Accordingly, sepsis according to the sepsis-3 definition is defined as life-threatening organ dysfunction caused by a dysregulated host response to infection. Because organ failure is already a component of sepsis by definition, the classification severe sepsis is not used in this definition. According to this definition, sepsis is present if (A) there is a diagnosed or suspected infection and (B) the Sequential Organ Failure Assessment (SOFA; see Intensive Care Med. 1996; 22:707-10) score increases by ≥2 points. According to this definition, septic shock is a subset of sepsis in which underlying circulatory and cellular/metabolic abnormalities are profound enough to substantially increase mortality. For this reason, in addition to severe hypotension lactate concentration is measured for the diagnosis of septic shock, and values ≥2 mmol/L after volume substitution are used as a criterion for septic shock (JAMA 2016; 315:775-87). Outside of intensive care management of patients, it is advised to use the so-called Quick Sequential Organ Failure Assessment-(qSOFA; see Jama 2016; 315:762-74) score, an abbreviated procedure to detect organ failure, to intensively monitor patients with suspected systemic infection. Regular collection of the qSOFA score outside of ITS departments has gained acceptance as a predictive value for detecting vital threats to high-risk patients, but it can only be performed by trained staff and requires time.

[0076] Additionally, microbiological and molecular biological methods are currently used to detect an infection or a suspected infection, in particular a systemic infection or a suspected systemic infection, which is part of a sepsis, severe sepsis or septic shock (according to sepsis-2 and sepsis-3).

[0077] Current diagnostics are disadvantageous because typically samples are taken from all body localizations that appear as a possible focus of the infection, for example infectious foci, blood, liquor, bronchoalveolar lavage or urine. The decision from which sites samples should be taken requires careful consideration on the part of the treatment team. If bloodstream infection is suspected, e.g. due to a catheter-induced infection, a culture from the catheter is also recommended.

[0078] According to the present invention, this decision-making process with respect to the localization of the infection focus is not necessary. The invention merely requires one biological sample, typically whole blood or plasma isolated from whole blood. It is not necessary to make a decision whether an infection is suspected or not because the method allows discriminating between a systemic inflammation caused by an infectious agent and a systemic inflammation not caused by an infectious agent, in particular between sepsis and SIRS, based on the level of sVSIG4 in the biological sample. The determination of the level of sVSIG4 in the biological sample is fast and reliable. Fast determination is especially advantageous because the earlier the diagnosis, the earlier the onset of therapy which goes along with a decrease of mortality. For example, if a bacterial infection is suspected and diagnosed by the use of a specific biomarker, in particular causing a sepsis, therapy with broad-spectrum antibiotics can be readily initiated. Fast onset of therapy is especially crucial for sepsis management. Therapy with a specific antibiotic can be initiated after analysis of a blood culture but this is not time-critical as long as treatment with broad-spectrum antibiotics have been initiated. Hence, the present invention helps by enabling fast onset of treatment of systemic inflammations, in particular caused by an infectious agent.

[0079] Sepsis is most frequently caused by bacterial pathogens, although viruses, protozoa and fungi can also rarely trigger a sepsis. Early targeted use of antibiotics can contain the inflammatory response caused by bacterial pathogens, reduce severe courses, and decrease mortality rates. Conversely, delay in diagnosis can increase the risk of serious outcomes such as organ failure, chronic pain, amputation, or death. Despite the recognized importance of early diagnosis, diagnosis remains difficult due to the complexity of the disease with diverse physiological and biochemical changes and manifestations.

[0080] In terms of sepsis therapy, a “bundle” of therapies has been established, which produces greater benefit in terms of outcome than the individual therapeutic interventions. The current sepsis bundle includes determination of lactate, obtaining blood cultures and administering antibiotics.

[0081] The risk of mortality of a subject with systemic inflammation, in particular with sepsis, relates to the risk to die of the systemic inflammation, in particular to die of sepsis. The present invention allows determining the risk of mortality due to a systemic inflammation, in particular due to sepsis based on the presence and/or level of sVSIG4.

[0082] Typically, the risk of mortality is defined for a certain time frame, for example the risk of mortality can refer to the risk to die within at least 7 days, at least 10 days, at least 15 days, at least 20 days, at least 25 days or at least 30 days, preferably within 28 days, after diagnosis of the systemic inflammation, particularly of sepsis.

[0083] The risk can be expressed as probability in percentage terms. For example, a risk of mortality of a subject with a systemic inflammation of 20% within 28 days means that there is a probability of 20% that the subject dies of the systemic inflammation within 28 days.

[0084] In case a subject is at a higher risk to die of the systemic inflammation, i.e. the subject with systemic inflammation has a high risk of mortality, such as 60%, 70%, 80% or 90%, the subject can be subjected to targeted enhanced monitoring in order to detect complications at an early stage. The subject could for example be transferred to an intermediate care unit or transferred to an intensive care unit. Hence, it is very beneficial in the clinical practice to know about the risk of mortality.

[0085] The risk of mortality can preferably be detected very early in disease progression, typically on day 1 or 2 after diagnosis. A subject typically has a higher risk to die of the systemic inflammation caused by an infectious agent, typically within 28 days, if the level of sVSIG4 in a biological sample, preferably in human plasma, is high, e.g. at least 4500 pg/ml, at least 9000 pg/ml, at least 15000 pg/ml, at least 40000 pg/ml, or at least 50000 pg/ml.

[0086] Hence, in a preferred embodiment of the present invention, a level of sVSIG4 in the biological sample of at least 4500 pg/ml, at least 9000 pg/ml, at least 15000 pg/ml, at least 40000 pg/ml, or at least 50000 pg/ml indicates a risk of mortality of a subject with a systemic inflammation caused by an infectious agent of at least 50% within 28 days. The specificity is preferably about 82%. In a preferred embodiment, the subject is a human subject. Preferably, the biological sample is plasma.

[0087] In a particular embodiment of the present invention, a level of sVSIG4 in the biological sample of at least 4500 pg/ml, preferably at least 9000 pg/ml, more preferably at least 15000 pg/ml, more preferably at least 40000 pg/ml, more preferably at least 50000 pg/ml, indicates a risk of mortality of a subject with a systemic inflammation caused by an infectious agent of at least 50% within 28 days. The specificity is preferably about 82%. In a preferred embodiment, the subject is a human subject. Preferably, the biological sample is plasma.

[0088] In another preferred embodiment of the present invention, a level of sVSIG4 in the biological sample of at least 70000 pg/ml, at least 75000 pg/ml, at least 80000 pg/ml, or at least 85000 pg/ml indicates a risk of mortality of a subject with a systemic inflammation caused by an infectious agent of at least 30% within 28 days. The specificity is preferably about 85%. In a preferred embodiment, the subject is a human subject. Preferably, the biological sample is plasma.

[0089] In a particular embodiment of the present invention, a level of sVSIG4 in the biological sample of at least 70000 pg/ml, preferably at least 75000 pg/ml, more preferably at least 80000 pg/ml, more preferably at least 85000 pg/ml, indicates a risk of mortality of a subject with a systemic inflammation caused by an infectious agent of at least 30% within 28 days. The specificity is preferably about 85%. In a preferred embodiment, the subject is a human subject. Preferably, the biological sample is plasma.

[0090] The level of sVSIG4 in the biological sample also has an impact on the therapy management. If the level of sVSIG4 in the biological sample indicates a systemic inflammation caused by an infectious agent, such as a bloodstream infection or a sepsis, the subject can be treated accordingly. The therapist thereby learns when to take therapeutic measures. It is advantageous that the method of the present invention allows a very fast therapy decision. For example, a therapy with antibiotics can be initiated as soon as the level of sVSIG4 is known.

[0091] If necessary, differential diagnosis can follow. For example, in case a bloodstream infection is suspected because the subject has for example a catheter, a culture from the catheter may be started and reveal the potential pathogen. In case a sepsis is suspected, a blood culture may reveal the responsible pathogen. Further diagnostic measures can also serve the purpose of distinguishing between sepsis, severe sepsis and septic shock. Nevertheless, the method according to the present invention gives a fast indication whether the subject suffers from a systemic inflammation caused or not caused by an infectious agent and, in case of a systemic inflammation caused by an infectious agent, whether the subject suffers from a bloodstream infection or sepsis.

[0092] The method may also include further parameters for diagnosing a systemic inflammation, preferably a systemic inflammation caused by an infectious agent, the further parameters being in particular Sequential Organ Failure Assessment (SOFA) score, Quick Sequential Organ Failure Assessment (qSOFA) score, Acute Physiology and Chronic Healthy Evaluation II (APACHE-II) score and/or Simplified Acute Physiology Score II (SAPS-II).

[0093] The “Acute Physiology and Chronic Health Evaluation II” (APACHE-II) score is an ICU severity-of-disease classification system. It is applied within 24 h after ICU admission and an integer score from 0 to 71 is computed based on several measurements. A higher score corresponds to more severe disease and a higher risk of death. The point score is calculated from the following variables: blood-gas tension (PaO2) or alveolar-arterial gradient (AaDO2), body temperature, mean arterial pressure, blood pH, heart rate, respiratory rate, serum sodium, serum potassium, creatinine, hematocrit, white blood cell count, Glasgow Coma Scale.

[0094] The Simplified Acute Physiology Score II (SAPS-II) is also a disease severity classification scoring system in the ICU. The point score is calculated from the parameters: age, heart rate, systolic blood pressure, temperature, Glasgow Coma Scale, mechanical ventilation or continuous positive airway pressure (CPAP), blood gas tension (PaO2), fraction of inspired oxygen (FiO2), urine output, blood urea nitrogen, sodium, potassium, bicarbonate, bilirubin, white blood cell count, chronic diseases, type of admission.

[0095] In a preferred embodiment, a level of sVSIG4 in the biological sample of at least 20 pg/ml, at least 50 pg/ml, at least 100 pg/ml, at least 150 pg/ml, at least 200 pg/ml, or at least 250 pg/ml indicates the systemic inflammation. In a preferred embodiment, the subject is a human subject. Preferably, the biological sample is plasma.

[0096] In a particular embodiment, a level of sVSIG4 in the biological sample of at least 20 pg/ml, preferably at least 50 pg/ml, more preferably at least 100 pg/ml, more preferably at least 150 pg/ml, more preferably at least 200 pg/ml more preferably at least 250 pg/ml indicates the systemic inflammation. In a preferred embodiment, the subject is a human subject. Preferably, the biological sample is plasma.

[0097] Hence, a level of sVSIG4 of at least 20 pg/ml, at least 50 pg/ml, at least 100 pg/ml, at least 150 pg/ml, at least 200 pg/ml, or at least 250 pg/ml indicates that the subject is not healthy and in particular has a systemic inflammation. The systemic inflammation can be any type of systemic inflammation including SIRS and sepsis.

[0098] In a preferred embodiment, a level of sVSIG4 in the biological sample of at least 20 pg/ml, at least 50 pg/ml, at least 100 pg/ml, at least 150 pg/ml, at least 200 pg/ml, or at least 250 pg/ml and less than 100000 pg/ml, less than 50000 pg/ml, less than 12500 pg/ml, less than 10000 pg/ml, or less than 6000 pg/ml indicates the SIRS. In a preferred embodiment, the subject is a human subject. Preferably, the biological sample is plasma.

[0099] In particular embodiment, a level of sVSIG4 in the biological sample of at least 20 pg/ml, preferably at least 50 pg/ml, more preferably at least 100 pg/ml, more preferably at least 150 pg/ml, more preferably at least 200 pg/ml, more preferably at least 250 pg/ml and less than 100000 pg/ml, preferably less than 50000 pg/ml, more preferably less than 12500 pg/ml, more preferably less than 10000 pg/ml, more preferably less than 6000 pg/ml indicates the SIRS. In a preferred embodiment, the subject is a human subject. Preferably, the biological sample is plasma.

[0100] In another preferred embodiment, a level of sVSIG4 in the biological sample of at least 200 pg/ml, at least 250 pg/ml, at least 300 pg/ml, at least 350 pg/ml, or at least 400 pg/ml indicates the bloodstream infection. For example, when an infection is suspected or proven the indicated levels point to a bloodstream infection. In a preferred embodiment, the subject is a human subject. Preferably, the biological sample is plasma.

[0101] In a particular embodiment, a level of sVSIG4 in the biological sample of at least 200 pg/ml, preferably at least 250 pg/ml, more preferably at least 300 pg/ml, more preferably at least 350 pg/ml, more preferably at least 400 pg/ml indicates the bloodstream infection. For example, when an infection is suspected or proven the indicated levels point to a bloodstream infection. In a preferred embodiment, the subject is a human subject. Preferably, the biological sample is plasma.

[0102] In another preferred embodiment, a level of sVSIG4 in the biological sample of at least 500 pg/ml, at least 550 pg/ml, at least 600 pg/ml, at least 650 pg/ml, at least 700 pg/ml, at least 750 pg/ml, at least 1000 pg/ml, at least 1500 pg/ml, at least 2500 pg/ml, at least 3500 pg/ml, at least 5000 pg/ml, at least 7500 pg/ml, at least 10000 pg/ml, or at least 12500 pg/ml indicates the sepsis. In a preferred embodiment, the subject is a human subject. Preferably, the biological sample is plasma.

[0103] In a particular embodiment, a level of sVSIG4 in the biological sample of at least 500 pg/ml, preferably at least 550 pg/ml, more preferably at least 600 pg/ml, more preferably at least 650 pg/ml, more preferably at least 700 pg/ml, more preferably at least 750 pg/ml, more preferably at least 1000 pg/ml, more preferably at least 1500 pg/ml, more preferably at least 2500 pg/ml, more preferably at least 3500 pg/ml, more preferably at least 5000 pg/ml, more preferably at least 7500 pg/ml, more preferably at least 10000 pg/ml, more preferably at least 12500 pg/ml indicates the sepsis. In a preferred embodiment, the subject is a human subject. Preferably, the biological sample is plasma.

[0104] In particular, a cut-off value of at least 1500 pg/ml, at least 5000 pg/ml, at least 10000 pg/ml, or at least 12500 pg/ml allows identifying a subject having sepsis and not having SIRS. In a preferred embodiment, the subject is a human subject. Preferably, the biological sample is plasma.

[0105] Hence, in one embodiment, a level of sVSIG4 in the biological sample of at least 1500 pg/ml, at least 5000 pg/ml, at least 10000 pg/ml, or at least 12500 pg/ml indicates the sepsis and discriminates between SIRS and sepsis. In a preferred embodiment, the subject is a human subject. Preferably, the biological sample is plasma.

[0106] In a particular embodiment, a level of sVSIG4 in the biological sample of at least 1500 pg/ml, preferably at least 5000 pg/ml, more preferably at least 10000 pg/ml, more preferably at least 12500 pg/ml indicates the sepsis and discriminates between SIRS and sepsis. In a preferred embodiment, the subject is a human subject. Preferably, the biological sample is plasma.

[0107] The protein sVSIG4 may also be termed a biomarker in the context of the present invention. A “biomarker” in the sense of the present invention refers for example to a biological compound, such as a peptide, a polypeptide, or a protein, preferably a polypeptide or a protein. Hence, the biomarker may be protein-based, i.e. the biomarker comprises a polypeptide or a protein, preferably is a polypeptide or a protein.

[0108] A biomarker in the sense of the present invention is preferably a human polypeptide or protein. The names of the biomarkers are usually presented herein as full names and their abbreviation in parentheses, or only the abbreviation is presented. All biomarkers and their sequences and abbreviations are retrieved from the UniProt database. The abbreviations of the biomarkers (also known as entry names) can alternatively have the suffix “_HUMAN”. With and without the suffix the same polypeptide or protein is meant.

[0109] In one aspect, a biomarker which level in a biological sample from a subject exceeds a reference level (cut-off value) indicates a systemic inflammation per se. The same or another reference level, preferably a higher reference level, indicates a sepsis. A level exceeds a reference level if the numerical value of the level is higher than the numerical value of the reference level. The method of determining the level can be any suitable method and will be further described infra.

[0110] “Cut-off value” as used herein refers to an assay cut-off value (threshold or reference level) that is used to assess diagnostic, prognostic, or therapeutic efficacy results by comparing the assay results against the predetermined cut-off value/sVSIG4 level, where the predetermined cut-off value/sVSIG4 level has already been linked or associated with various clinical parameters (e.g., presence of disease, stage of disease, severity of disease, progression, non-progression, or improvement of disease, etc.). The disclosure provides exemplary predetermined levels. However, it is well-known that cut-off values may vary depending on the nature of the immunoassay (e.g., antibodies employed, reaction conditions, sample purity, etc.). It is further well within the ordinary skill of one in the art to adapt the disclosure herein for other immunoassays to obtain immunoassay-specific cut-off values for those other immunoassays based on the description provided by this disclosure. Whereas the precise value of the predetermined cut-off/sVSIG4 level may vary between assays, the correlations as described herein are generally applicable.

[0111] Cut-off values/reference levels can be used herein to determine whether an individual is suffering from a systemic inflammation caused by an infectious agent, or from a systemic inflammation not caused by an infectious agent, or is a healthy subject with no systemic inflammation. The reference levels of sVSIG4 or sVSIG4 in combination with other markers for infection can be used to determine whether a subject is suffering from a systemic inflammation caused by an infectious agent, or from a systemic inflammation not caused by an infectious agent, or is a healthy subject that is free of a systemic inflammation. The reference level of sVSIG4 alone, or used in particular combinations, may be a predetermined cut-off value, or a level determined from a control subject, wherein that control subject is known to be a healthy subject without a systemic inflammation, a subject with a systemic inflammation not caused by an infectious agent (e.g. SIRS) or a subject with a systemic inflammation caused by an infectious agent.

[0112] Cut-off values (or predetermined cut-off values) may be determined by a receiver operating curve (ROC) analysis from biological samples of a patient group. ROC analysis, as generally known in the biological arts, is a determination of the ability of a test to discriminate one condition from another, e.g. to determine the performance of markers in identifying subjects with a systemic inflammation caused or not caused by an infectious agent, in particular sepsis, severe sepsis or septic shock. Alternatively, cutoff values can be determined by a quartile analysis of biological samples of a patient group. A cut-off value can also be determined by selecting a value that corresponds to any value in the 25th-75th percentile range, preferably a value that corresponds to the 25th percentile, the 50th percentile or the 75th percentile, preferably the 75th percentile.

[0113] A cut-off value can for example be determined experimentally as shown in FIG. 16. For example, a cut-off value can be the level at which the sensitivity and specificity curves cross. However, a lower cut-off value can also be chosen which will be concomitant with an increase in sensitivity at the cost of lower specificity. A higher cut-off value is also possible which will be concomitant with lower sensitivity and increased specificity. A high sensitivity typically means that every positive subject is identified, yet at the expense of false-positives. A high specificity means that the subjects not affected are reliably excluded but at the expense of false-negatives. Depending on one's need, an optimal cut-off value can be chosen.

[0114] In another aspect, the biomarker is differentially abundant in a biological sample from a subject having a systemic inflammation, in particular a sepsis, as compared to a comparable biological sample from a control subject. The control subject may be a healthy subject or a subject with no diagnosed or suspected infection (a non-infected subject) or a subject with a negative diagnosis of sepsis. For example, the control subject is a subject suffering from SIRS.

[0115] The terms “peptide”, “polypeptide” and “protein” can be used synonymously and refer to a polymer of amino acids and are not limited to a minimum or maximum length. Both full-length proteins and fragments thereof are encompassed by the definition.

[0116] Posttranslational modifications of the peptide, the polypeptide, or the protein are also encompassed, for example, glycosylation, acetylation, hydroxylation, phosphorylation, and/or oxidation, in particular glycosylation.

[0117] The term “differentially abundant” or “differentially expressed” relates to a difference in the quantity, i.e. the determined level, of a biomarker in a biological sample taken from a subject having, for example, systemic inflammation, in particular a sepsis, as compared to a control subject. The level of the biomarker may thus be increased or decreased as compared to a control subject.

[0118] A biomarker is differentially abundant or differentially expressed between two biological samples if the level of the biomarker in one biological sample is different from the level of the biomarker in the other sample. For example, a biomarker is differentially abundant or differentially expressed in two biological samples if the level of the biomarker is increased by at least about 20%, at least about 30%, at least about 50%, at least about 80%, at least about 100%, at least about 200%, at least about 400% compared with the other biological sample, or if it is detectable in one biological sample and not detectable in the other biological sample.

[0119] The systemic inflammation may be caused by an infectious agent or not be caused by an infectious agent. In case the systemic inflammation is caused by an infectious agent, it may be a sepsis, systemic infection or bloodstream infection. In case the systemic inflammation is not caused by an infectious agent, for example no infectious agent is detectable, the systemic inflammation may be SIRS.

[0120] Typically, the infectious agent is a bacterium, a fungus or a virus. In one embodiment, the bacterium is a gram positive or a gram negative bacterium.

[0121] The virus may be influenza A virus, influenza B virus, respiratory syncytial virus (RSV), rhinovirus, and/or coronavirus, in particular severe acute respiratory syndrome coronavirus type 2 (SARS-COV2).

[0122] In a very preferred embodiment, the systemic inflammation is caused by an infectious agent and is a sepsis, a severe sepsis or a septic shock according to the sepsis-2 definition.

[0123] In one embodiment, the method further comprises:
[0124] determining the level of one or more additional biomarkers in the biological sample; and
[0125] in step b) drawing a conclusion as to the diagnosis of a systemic inflammation or the prognosis of a risk of mortality of a subject with systemic inflammation from the presence and/or level of sVSIG4 in combination with the presence and/or level of the one or more additional biomarkers.

[0126] The one or more additional biomarkers may serve to confirm or undermine the diagnosis or prognosis. The one or more additional biomarkers are preferably detectable in the same biological sample as sVSIG4 and are preferably also soluble in that they are not bound to a cell or membrane. Although the method allows diagnosis and prognosis based on solely sVSIG4 as a biomarker, one or more further biomarkers may thus be helpful.

[0127] The one or more additional biomarkers can be revealed experimentally, e.g. in that differentially abundant proteins in sepsis and SIRS patients are analyzed or in that levels of biomarkers of patients, which have subsequently died of the systemic inflammation, are compared.

[0128] The one or more additional biomarkers are preferably selected from the group consisting of IgGFc-binding protein (FCGBP), GDNF family receptor alpha-2 (GFRA2), Carboxypeptidase D (CBPD), Asialoglycoprotein receptor 1 (ASGR1), Hypoxia upregulated protein 1 (HYOU1), Tenascin (TENA), Polymeric immunoglobulin receptor (PIGR), Sushi, von Willebrand factor type A, EGF and Pentraxin domain-containing protein 1 (SVEP1), Interleukin-1 receptor type 2 (IL1R2), Laminin subunit beta-1 (LAMB1), Endoplasmic reticulum chaperone BiP (BIP), Peroxidasin homolog (PXDN), Follistatin-related protein 1 (FSTL1), Leucine-rich alpha-2 glycoprotein (A2GL), Metalloproteinase inhibitor 1 (TIMP1), NPC intracellular cholesterol transporter 2 (NPC2), Peptidoglycan recognition protein 1 (PGRP1), Lactotransferrin (TRFL), Dystonin (DYST), Lipopolysaccharide-binding protein (LBP), Haptoglobin (HPT), Asialoglycoprotein receptor 2 (ASGR2), Non-secretory ribonuclease (RNAS2), Azurocidin (CAP7), Chitinase-3-like protein 1 (CH3L1), Tumor necrosis factor receptor superfamily member 1B (TNR1B), HLA class II histocompatibility antigen gamma chain (HG2A), Olfactomedin-4 (OLFM4), Leukocyte immunoglobulin-like receptor subfamily A member 3 (LIRA3), Insulin-like growth factor-binding protein 2 (IBP2), Growth/differentiation factor 15 (GDF15), Laminin subunit alpha-2 (LAMA2), Tyrosine-protein phosphatase non-receptor type substrate 1 (SHPS1), Basigin (BASI), Fibroleukin (FGL2), Cathepsin Z (CATZ), E-selectin (LYAM2), Lymphatic vessel endothelial hyaluronic acid receptor 1 (LYVE1), Disintegrin and metalloproteinase domain-containing protein 9 (ADAM9), Desmocollin-2 (DSC2), Interleukin-1 receptor-like 1 (ILRL1), Matrix metalloproteinase-9 (MMP9), Cystatin-C(CYTC), Interleukin-18-binding protein (I18BP), Paired immunoglobulin-like type 2 receptor alpha (PILRA), Macrophage mannose receptor 1 (MRC1), Osteopontin (OSTP), Scavenger receptor cysteine-rich type 1 protein M130 (C163A), Integral membrane protein 2B (ITM2B), Fibrinogen-like protein 1 (FGL1), Serum amyloid A-1 protein (SAA1), Interleukin-1 receptor antagonist protein (IL1RA), Nucleobindin-1 (NUCB1), Golgi membrane protein 1 (GOLM1), Dystroglycan (DAG1), CD177 antigen (CD177), Alkaline phosphatase, tissue-nonspecific isozyme (PPBT), Neutrophil collagenase (MMP8), Myeloblastin (PRTN3), Neutrophil elastase (ELNE), Beta-1,4-galactosyltransferase 1 (B4GT1), C-reactive protein (CRP), WAP four-disulfide core domain protein 2 (WFDC2), Follistatin-related protein 3 (FSTL3), Ribonuclease pancreatic (RNAS1), Neutrophil gelatinase-associated lipocalin (NGAL), Serum amyloid A-2 protein (SAA2), Lithostathine-1-alpha (REG1A), Plasma kallikrein (KLKB1), Phosphatidylcholine-sterol acyltransferase (LCAT), Serotransferrin (TRFE), Procalcitonin (PCT)), Complement receptor type 2 (CR2), Voltage-dependent calcium channel subunit alpha-2/delta-1 (CA2D1) Indian hedgehog protein (IHH), Serum paraoxonase/lactonase 3 (PON3), Fibronectin (FINC), Beta-Ala-His-dipeptidase (CNDP1), Insulin-like growth factor-binding protein complex acid labile subunit (ALS), Phosphatidylinositol-glycan-specific phospholipase D (PHLD), Insulin-like growth factor-binding protein 3 (IBP3), Anthrax toxin receptor 1 (ANTR1), Neuronal growth regulator 1 (NEGR1), Plasma serine protease inhibitor (IPSP), Intelectin-1 (ITLN1), Kallistatin (KAIN), Fibroblast growth factor receptor 1 (FGFR1), Alpha-2-HS-glycoprotein (FETUA), Cholinesterase (CHLE), Afamin (AFAM), Cathepsin F (CATF), Cholesteryl ester transfer protein (CETP), Cadherin-related family member 5 (CDHR5), Inter-alpha-trypsin inhibitor heavy chain H2 (ITIH2), N-acetylmuramoyl-L-alanine amidase (PGRP2), Contactin-1 (CNTN1), Apolipoprotein(a) (APOA), Cell growth regulator with EF hand domain protein 1 (CGRE1), Coagulation factor VIII (FA8), Phospholipid transfer protein (PLTP), Protein Z-dependent protease inhibitor (ZPI), Alpha-1-antichymotrypsin (AACT), Vitamin K-dependent protein S (PROS), Coagulation factor XIII B chain (F13B), Prenylcysteine oxidase 1 (PCYOX), Serum amyloid A-4 protein (SAA4) Apolipoprotein C-I (APOC1), Prolyl endopeptidase FAP (SEPR), Dipeptidylpeptidase 4 (DPP4), Angiotensin-converting enzyme 2 (ACE2), Interleukin-1 receptor accessory protein (IL1AP), Di-N-acetylchitobiase (DIAC), Hepatocyte growth factor activator (HGFA), Selenoprotein P (SEPP1), A disintegrin and metalloproteinase with thrombospondin motifs 13 (ATS13), Monocyte differentiation antigen CD14 (CD14), Complement factor H-related protein 1 (FHR1), von Willebrand factor (VWF), Laminin subunit gamma-1 (LAMC1), Scavenger receptor class A member 5 (SCAR5), ADAMTS-like protein 4 (ATL4), Cullin-1 (CUL1), Pulmonary surfactant-associated protein B (PSPB), Neuroblastoma suppressor of tumorigenicity (NBL1), Ganglioside GM2 activator (SAP3), Protein disulfide isomerase CRELD1 (CREL1), Cadherin-related family member 2 (CDHR2), Chymotrypsin-like elastase family member 3B (CEL3B), Phosphoinositide-3-kinase-interacting protein 1 (P3IP1), Lithostathine-1-beta (REG1B), Kininogen-1 (KNG1), Versican core protein (CSPG2), EMILIN-2 (EMIL2), Carcinoembryonic antigen-related cell adhesion molecule 6 (CEAM6), Fibromodulin (FMOD), Beta-galactoside alpha-2,6-sialyltransferase 1 (SIAT1), Leukocyte immunoglobulin-like receptor subfamily B member 5 (LIRB5), Latent-transforming growth factor beta-binding protein 2 (LTBP2), Chromogranin-A (CMGA) and Adseverin (ADSV), Histidine-rich glycoprotein (HRG), Inter-alpha-trypsin inhibitor heavy chain H1 (ITIH1), and Inter-alpha-trypsin inhibitor heavy chain H3 (ITIH3), wherein in step b) a conclusion is drawn as to the diagnosis of a systemic inflammation. Preferably, the systemic inflammation is sepsis.

[0129] In a particular embodiment, the one or more additional biomarkers in the biological sample are selected from one or more of the following:
[0130] (i) Inter-alpha-trypsin inhibitor heavy chain H2 (ITIH2), Inter-alpha-trypsin inhibitor heavy chain H1 (ITIH1), Phosphatidylinositol-glycan-specific phospholipase D (PHLD), N-acetylmuramoyl-L-alanine amidase (PGRP2), Kallistatin (KAIN), Alpha-2-HS-glycoprotein (FETUA), Inter-alpha-trypsin inhibitor heavy chain H3 (ITIH3), Afamin (AFAM), Macrophage mannose receptor 1 (MRC1), Cholinesterase (CHLE), Insulin-like growth factor-binding protein complex acid labile subunit (ALS), Serotransferrin (TRFE), Phosphatidylcholine-sterol acyltransferase (LCAT), Beta-Ala-His dipeptidase (CNDP1), Plasma kallikrein (KLKB1), Alpha-1-antichymotrypsin (AACT), Monocyte differentiation antigen CD14 (CD14), Neutrophil gelatinase-associated lipocalin (NGAL), Hepatocyte growth factor activator (HGFA), Scavenger receptor cysteine-rich type 1 protein M130 (C163A), Fibronectin (FINC), Histidine-rich glycoprotein (HRG), and Alpha-1-antitrypsin (A1AT);
[0131] (ii) Phosphatidylinositol-glycan-specific phospholipase D (PHLD), Kallistatin (KAIN), Alpha-2-HS-glycoprotein (FETUA), Afamin (AFAM), Macrophage mannose receptor 1 (MRC1), Cholinesterase (CHLE), Insulin-like growth factor-binding protein complex acid labile subunit (ALS), Beta-Ala-His dipeptidase (CNDP1), Neutrophil gelatinase-associated lipocalin (NGAL), Scavenger receptor cysteine-rich type 1 protein M130 (C163A), Plasma serine protease inhibitor (IPSP), Leucine-rich alpha-2-glycoprotein (A2GL), Lithostathine-1-alpha (REG1A), Lipopolysaccharide-binding protein (LBP), Lymphatic vessel endothelial hyaluronic acid receptor 1 (LYVE1), Insulin-like growth factor-binding protein 3 (IBP3), Complement receptor type 2 (CR2), Fibronectin (FINC), Asialoglycoprotein receptor 2 (ASGR2), Alkaline phosphatase, tissue-nonspecific isozyme (PPBT), Serum amyloid A-2 protein (SAA2), and Dipeptidylpeptidase 4 (DPP4);
[0132] (iii) Inter-alpha-trypsin inhibitor heavy chain H2 (ITIH2), N-acetylmuramoyl-L-alanine amidase (PGRP2), and Monocyte differentiation antigen CD14 (CD14);
[0133] (iv) Inter-alpha-trypsin inhibitor heavy chain H2 (ITIH2);
[0134] (v) Phosphatidylinositol-glycan-specific phospholipase D (PHLD), Leucine-rich alpha-2-glycoprotein (A2GL), and Insulin-like growth factor-binding protein 3 (IBP3);
[0135] (vi) Phosphatidylinositol-glycan-specific phospholipase D (PHLD);
[0136] (vii) C-reactive protein (CRP);
[0137] (viii) Procalcitonin (PCT);
[0138] (ix) Lithostathine-1-alpha (REG1A);
[0139] (x) Myeloblastin (PRTN3);
[0140] (xi) CRP and PCT,
[0141] wherein in step b) a conclusion is drawn as to the diagnosis of a systemic inflammation. Preferably, the systemic inflammation is sepsis.

[0142] In the sense of the present invention, sVSIG4 as a biomarker can be combined with one or more of the one or more additional biomarkers as recited supra. In particular, sVSIG4 as a biomarker can be combined with one or more of groups (i) to (xi). Hence, in one embodiment, in step a) in addition to determining the level of sVSIG4, the level of one or more further soluble proteins in the biological sample is determined which can be used as biomarkers. Although it is sufficient to only determine the level of sVSIG4, it may be beneficial for the diagnosis to determine the levels of further soluble proteins.

[0143] In another preferred embodiment, the one or more additional biomarkers are preferably selected from the group consisting of Kininogen-1 (KNG1), Tenascin (TENA), Versican core protein (CSPG2), Cadherin-related family member 2 (CDHR2), EMILIN-2 (EMIL2), Osteopontin (OSTP), Tyrosine-protein phosphatase non-receptor type substrate 1 (SHPS1), Lithostathine-1-beta (REG1B), Carcinoembryonic antigen-related cell adhesion molecule 6 (CEAM6), Paired immunoglobulin-like type 2 receptor alpha (PILRA), HLA class II histocompatibility antigen gamma chain (HG2A), Scavenger receptor cysteine-rich type 1 protein M130 (C163A), Fibroleukin (FGL2), Follistatin-related protein 3 (FSTL3), Fibromodulin (FMOD), Beta-galactoside alpha-2,6-sialyltransferase 1 (SIAT1), Myeloblastin (PRTN3), Leukocyte immunoglobulin-like receptor subfamily B member 5 (LIRB5), N-acetylmuramoyl-L-alanine amidase (PGRP2), Interleukin-1 receptor-like 1 (ILRL1), Neutrophil gelatinase-associated lipocalin (NGAL), Latent-transforming growth factor beta-binding protein 2 (LTBP2), Interleukin-1 receptor antagonist protein (IL1RA), Chromogranin-A (CMGA), Phosphoinositide-3-kinase-interacting protein 1 (P3IP1), Ribonuclease pancreatic (RNAS1), Ganglioside GM2 activator (SAP3), Neutrophil elastase (ELNE), Adseverin (ADSV), Disintegrin and metalloproteinase domain-containing protein 9 (ADAM9), Lithostathine-1-alpha (REG1A), Nucleobindin-1 (NUCB1), and WAP four-disulfide core domain protein 2 (WFDC2), wherein in step b) a conclusion is drawn as to the prognosis of a risk of mortality of a subject with a systemic inflammation. Preferably, the systemic inflammation is sepsis.

[0144] In a particular embodiment, the one or more additional biomarkers in the biological sample are selected from one or more of the following:
[0145] (i) Kininogen-1 (KNG1) and Tenascin (TENA);
[0146] (ii) Versican core protein (CSPG2), Cadherin-related family member 2 (CDHR2), EMILIN-2 (EMIL2), Osteopontin (OSTP), Tyrosine-protein phosphatase non-receptor type substrate 1 (SHPS1), Lithostathine-1-beta (REG1B), Carcinoembryonic antigen-related cell adhesion molecule 6 (CEAM6), Paired immunoglobulin-like type 2 receptor alpha (PILRA), HLA class II histocompatibility antigen gamma chain (HG2A), Scavenger receptor cysteine-rich type 1 protein M130 (C163A), Fibroleukin (FGL2), Follistatin-related protein 3 (FSTL3), Fibromodulin (FMOD), Beta-galactoside alpha-2,6-sialyltransferase 1 (SIAT1), Myeloblastin (PRTN3), Leukocyte immunoglobulin-like receptor subfamily B member 5 (LIRB5), N-acetylmuramoyl-L-alanine amidase (PGRP2), Interleukin-1 receptor-like 1 (ILRL1), Neutrophil gelatinase-associated lipocalin (NGAL), Latent-transforming growth factor beta-binding protein 2 (LTBP2), Interleukin-1 receptor antagonist protein (IL1RA), Chromogranin-A (CMGA), Phosphoinositide-3-kinase-interacting protein 1 (P3IP1), Ribonuclease pancreatic (RNAS1), Ganglioside GM2 activator (SAP3), Neutrophil elastase (ELNE), Adseverin (ADSV), Disintegrin and metalloproteinase domain-containing protein 9 (ADAM9), Lithostathine-1-alpha (REG1A), Nucleobindin-1 (NUCB1), and WAP four-disulfide core domain protein 2 (WFDC2);
[0147] (iii) Scavenger receptor cysteine-rich type 1 protein M130 (C163A), Kallistatin (KAIN), Macrophage mannose receptor 1 (MRC1), Lymphatic vessel endothelial hyaluronic acid receptor 1 (LYVE1), Cholinesterase (CHLE), Ribonuclease pancreatic (RNAS1), Phospahtidylinositol-glycan-specific phospholipase D (PHLD), Afamin (AFAM), Insulin-like growth factor-binding protein complex acid labile subunit (ALS), Neutrophil gelatinase-associated lipocalin (NGAL), Phosphoinositide-3-kinase-interacting protein 1 (P3IP1), Alpha-2-HS-glycoprotein (FETUA), Ganglioside GM2 activator (SAP3), Beta-Ala-His-dipeptidase (CNDP1), Paired immunoglobulin-like type 2 receptor alpha (PILRA), CD177 antigen (CD177), V-type proton ATPase subunit S1 (VAS1), Plasma serine protease inhibitor (IPSP), Follistatin-related protein 3 (FSTL3), Pulmonary surfactant-associated protein B (PSPB), Tumor necrosis factor receptor superfamily member 1B (TNR1B), WAP four-disulfide core domain protein 2 (WFDC2), Alkaline phosphatase, tissue-nonspecific isozyme (PPBT), and Metalloproteinase inhibitor 1 (TIMP1);
[0148] (iv) C-reactive protein (CRP);
[0149] (v) Procalcitonin (PCT);
[0150] (vi) Lithostathine-1-alpha;
[0151] (vii) CRP and PCT,

[0152] wherein in step b) a conclusion is drawn as to the prognosis of a risk of mortality of a subject with a systemic inflammation. Preferably, the systemic inflammation is sepsis.

[0153] In the sense of the present invention, sVSIG4 as a biomarker can be combined with one or more of the one or more additional biomarkers as recited supra. In particular, sVSIG4 as a biomarker can be combined with one or more of groups (i) to (vii). Hence, in one embodiment, in step a) in addition to determining the level of sVSIG4, the level of one or more further soluble proteins in the biological sample is determined which can be used as biomarkers. Although it is sufficient to only determine the level of sVSIG4, it may be beneficial for the prognosis of mortality to determine the levels of further soluble proteins.

[0154] In a very preferred embodiment, sVSIG4 can be used in combination with CRP, Myeloblastin (PRTN3), Phosphatidylinositol-glycan-specific phospholipase D (PHLD) and/or PCT for diagnosis of a systemic inflammation, preferably caused by an infectious agent, preferably sepsis. Hence, sVSIG4 can be used in combination with CRP in the diagnosis of sepsis. In another embodiment, sVSIG4 is used in combination with myeloblastin (PRTN3) in the diagnosis of sepsis. In another embodiment, sVSIG4 is used in combination with Phosphatidylinositol-glycan-specific phospholipase D (PHLD) in the diagnosis of sepsis. In another embodiment, sVSIG4 is used in combination with PCT in the diagnosis of sepsis. In yet another embodiment, sVSIG4 is used in combination with CRP and PCT in the diagnosis of sepsis.

[0155] The same combinations are also beneficial for determining the risk of mortality of a subject with a systemic inflammation, preferably sepsis.

[0156] A predictor can be constructed as a linear combination of two variables. The respective weights for the two variables can be calculated using a linear discriminant analysis (LDA) for the classification of SIRS vs sepsis patients. Prior to LDA the data is preferably log-transformed, centered (to mean) and scaled (by standard deviation). Sensitivity and specificity are preferably plotted for each predictor.

[0157] For example, with the linear combination of sVSIG4 and CRP, the following calculation can be used to calculate the predictor (cf. FIG. 16F):

predictor=−0.4268478×In(sVSIG4)−0.4500494×In(CRP)+5.927552

[0158] A predictor calculated by this equation less than 3, preferably less than 0.5, preferably less than 0, more preferably less than −0.2 may indicate a sepsis based on the determination of the levels of sVSIG4 and CRP in the biological sample.

[0159] Hence, in a preferred embodiment, a method is provided, wherein a predictor based on the determination of the levels of sVSIG4 and CRP in the biological sample and calculated by −0.4268478×In(sVSIG4)−0.4500494×In(CRP)+5.927552 less than 3, preferably less than 0.5, preferably less than 0, more preferably less than −0.2 indicates the sepsis. In a preferred embodiment, the subject is a human subject. Preferably, the biological sample is plasma.

[0160] In another preferred embodiment, a method is provided, wherein a predictor based on the determination of the levels of sVSIG4 and CRP in the biological sample and calculated by −0.4268478×In(sVSIG4)−0.4500494×In(CRP)+5.927552 less than 1, preferably less than 0, more preferably less than −1 indicates a risk of mortality of a subject with a systemic inflammation, preferably a sepsis, of at least 50% within 28 days. In a preferred embodiment, the subject is a human subject. Preferably, the biological sample is plasma.

[0161] With the linear combination of sVSIG4 and myeloblastin (PRTN3), the following calculation can be used to calculate the predictor (cf. FIG. 16G):

$$predictor = - 0.4331127 \times ln ( sVSIG 4 ) - 0.4901329 \times ln ( PRTN 3 ) + 9.942252$$

[0162] Hence, in a preferred embodiment, a predictor based on the determination of the levels of sVSIG4 and myeloblastin (PRTN3) in the biological sample and calculated by −0.4331127×In(sVSIG4)−0.4901329×In(PRTN3)+9.942252 less than 2, preferably less than 1, more preferably less than −0.1 indicates the sepsis. In a preferred embodiment, the subject is a human subject. Preferably, the biological sample is plasma.

[0163] In another preferred embodiment, a predictor based on the determination of the levels of sVSIG4 and myeloblastin (PRTN3) in the biological sample and calculated by −0.4331127×In(sVSIG4)−0.4901329×In(PRTN3)+9.942252 less than 0, preferably less than −1 indicates a risk of mortality of a subject with a systemic inflammation, preferably a sepsis, of at least 50% within 28 days. In a preferred embodiment, the subject is a human subject. Preferably, the biological sample is plasma.

[0164] In one embodiment, sVSIG4 is a glycoprotein, i.e. a protein which contains oligosaccharide chains (glycans) covalently attached to amino acid side-chains. The glycosylation in particular comprises N-glycosylation and/or O-glycosylation, preferably O-glycosylation.

[0165] The glycosylation can for example be analyzed by chemical oxidation of glycan structures linked to sVSIG4 by hydrazide chemistry resulting in aldehydes and modification with either biotin-labelled crosslinkers or hydrazide-activated agarose beads forming a stable conjugate via hydrazone bonds. Biotinylation of sVSIG4 can be detected by immunoprecipitation of labelled sVSIG4 and Western Blot analysis using avidin- or streptavidin conjugated with Horseradish peroxidase.

[0166] Hence, the method may comprise enriching glycosylated proteins in the biological sample. Thereby, the sample is more concentrated with respect to the glycosylated proteins and the determination of sVSIG4 would be improved.

[0167] The enriching of glycosylated proteins in the biological sample is preferably performed prior to step a). In particular, enriching glycosylated proteins in the biological sample includes performing one or more separation steps with the biological sample, in particular prior to step a).

[0168] In one embodiment, the one or more separation steps include chromatographic separation, preferably affinity chromatographic separation. The person skilled in the art is familiar with chromatographic methods.

[0169] In a preferred embodiment, the affinity chromatographic separation is selected from the group consisting of lectin affinity chromatography, separation by hydrazide chemistry, hydrophilic interaction chromatography and immunoaffinity chromatography.

[0170] In a further embodiment proteins of the biological sample are enzymatically degraded in the one or more separation steps for further analysis, in particular quantitative analysis. Enzymatic degradation can also be referred to as proteolytic cleavage and allows analysis such as mass spectrometry.

[0171] The determination step a) is preferably performed by one or more methods selected from the group consisting of chromatography, spectrometry, electrophoresis, spectroscopy, biochemical assay and immunoassay, preferably spectrometry, in particular mass spectrometry, and/or immunoassay.

[0172] Preferably, the mass spectrometry is a liquid chromatography-mass spectrometry (LC-MS), LC-MS/MS or matrix-assisted laser desorption ionization-time of flight mass spectrometry (MALDI-TOF MS).

[0173] Proteomic analyses of serum and plasma samples by mass spectrometry are often difficult because 95% of the total plasma protein amount is accounted for by 20 highly abundant proteins, which means that proteins present in significantly lower amounts are often not detectable or not reproducible. To avoid this problem, it is possible to not analyze the entirety of plasma proteins, but a selection of plasma proteins which are first enriched and subsequently analyzed. The focus is for example on glycosylated proteins, which are enzymatically posttranslationally modified with sugar groups after their synthesis at the ribosome. Yet, mass spectrometry is useful in the search for unknown proteins.

[0174] In another preferred embodiment, the immunoassay is selected from one or more of the group consisting of enzyme-linked immunoassay (ELISA), immunoscreening, lateral flow immunochromatographic assay, magnetic immunoassay and radio immunoassay, preferably ELISA. In a very preferred embodiment, ELISA is performed for specifically and accurately determining the level of sVSIG4 in the biological sample. The ELISA is preferably performed with a monoclonal antibody specific for human VSIG4, especially specific for the extracellular domain of human VSIG4. ELISA is advantageous because it is not necessary to process the biological sample, such as whole blood, plasma or serum, before use. The person skilled in the art is familiar with the ELISA technique. The ELISA may also include a further antibody directed against the extracellular domain of VSIG4 to perform a sandwich ELISA.

[0175] The ELISA may also include a further antibody directed against another biomarker so that the level of sVSIG4 and another biomarker can be determined.

[0176] It is also within the sense of the present invention that step a) comprises performing LC-MS, LC-MS/MS or MALDI-TOF MS and a subsequent step of analyzing the obtained data for determining the level of sVSIG4 in the biological sample. This combination may further enhance accuracy.

[0177] In a particularly preferred embodiment, the method comprises:
[0178] performing a depletion step and/or a fractionation step and/or enriching glycosylated proteins in the biological sample prior to step a); and
[0179] performing mass spectrometry in step a) for determining the level of sVSIG4 in the biological sample.

[0180] The “depletion step” typically involves separating and discarding cells or cell debris from the biological sample, for example by centrifugation. “Fractionation” in the sense of the present invention refers to separating the biological sample into its component parts, for example by centrifugation. The component parts are typically blood plasma, which can also be fractionated into its components, leukocytes and platelets, and erythrocytes.

[0181] Fractionation of plasma typically involves changing the conditions of the plasma (e.g., the temperature, the acidity or the hydration of proteins) so that proteins that are normally dissolved in the plasma fluid become insoluble, forming large clumps, called precipitate. Precipitation can for example be achieved with trichloroacetic acid, acetone, methanol-chloroform or ammonium sulfate. The insoluble protein can be collected by centrifugation.

[0182] The depletion step and/or a fractionation step and/or the enriching of glycosylated proteins in the biological sample prior to step a) typically serves the purpose of increasing the concentration of the protein to be detected, for example sVSIG4. In case the level of sVSIG4 is high enough for detection, these steps may be omitted.

[0183] The method may also comprise,
[0184] enriching glycosylated proteins comprising performing an affinity chromatographic separation step, in particular lectin affinity chromatography, separation by hydrazide chemistry or immunoaffinity chromatography;
[0185] optionally, enzymatically degrading proteins of the biological sample in the affinity chromatographic separation step.

[0186] In case the optional degradation step is performed, the level of sVSIG4 is determined on basis of the enzymatically degraded proteins, i.e. peptides. In case the optional degradation step is not performed, the level of sVSIG4 may be determined on basis of the soluble protein on the whole.

[0187] Possible peptides of the degradation step may be produced by proteolytic degradation or chemical cleavage methods. Examples for the use of trypsin protease for the proteolytic digestion of plasma-associated sVSIG4 are the ones depicted in Table 3. Other enzymes for the proteolytic digestion of plasma-associated sVSIG4 may also be used.

TABLE 3
Tryptic peptide sequences identified by mass
spectrometry.

| | No. of amino | |
|---|---|---|
| | acids of | |
| | VSIG4 | SEQ |
| Peptide sequence | isoform 1 | ID NO: |
| GDVNLPCTYDPLQGYTQVLVK | 35-55 | 9 |
| GSDPVTIFLR | 61-70 | 10 |
| VPGDVSLQLSTLEMDDR | 92-108 | 11 |
| SHYTCEVTWQTPDGNQVVR | 108-127 | 12 |
| LSVSKPTVTTGSGYGFTVPQGMR | 138-160 | 13 |
| PTVTTGSGYGFTVPQGMR | 143-160 | 14 |
| ISLQCQAR | 161-168 | 15 |
| GSPPISYIWYK | 169-179 | 16 |
| VATLSTLLFK | 190-199 | 17 |
| PAVIADSGSYFCTAK | 200-214 | 18 |

[0188] Preferably, the biological sample is a body fluid sample. Typically, a biological sample has a cellular and a non-cellular fraction. In a particularly preferred embodiment, the biological sample is the non-cellular fraction of a biological sample.

[0189] The body fluid sample is preferably selected from one or more of the group consisting of whole blood, plasma, serum, synovial fluid, pleural effusion, lymphatic fluid, urine, liquor, cerebrospinal fluid, ascites, and bronchial lavage, and samples derived from the foregoing, in particular cell-free or cell-depleted samples derived from the foregoing samples by removing cells.

[0190] In a particularly preferred embodiment, the biological sample is selected from the group consisting of whole blood, plasma and serum. Plasma or blood plasma refers to the liquid portion of blood, i.e. it is essentially cell-depleted, preferably cell-free. Serum typically refers to blood plasma without fibrinogens. Whole blood, plasma and serum can be easily retrieved from a subject and processed making the inventive method convenient and easy to perform.

[0191] The biological sample is prepared according to the usual standards. For example, in case blood is drawn for isolation of plasma, typically anticoagulants are added to the blood sample, such as heparin, EDTA and/or citrate. Other supplements are also possible.

[0192] In a preferred embodiment, the biological sample is a cell-free or cell-depleted sample. This is particularly useful because sVSIG4 is a soluble protein.

[0193] In a preferred method of the present invention, the biological sample is processed prior to step a), in particular by obtaining the non-cellular fraction of the biological sample.

[0194] In a particularly preferred embodiment, the biological sample is a body fluid, in particular whole blood, plasma or serum, and the biological sample is processed prior to step a).

[0195] Processing in the sense of the present invention comprises cell separation or depletion and/or chromatography.

[0196] In case of an infection, the focus of infection may be important to combat the causing pathogen. Thus, it is advantageous to identify the region of infection. Hence, in a preferred embodiment, the systemic inflammation is caused by an infectious agent and a conclusion is drawn as to the region of origin of the infection caused by the infectious agent by the method according to the invention.

[0197] The region of origin of the infection caused by the infectious agent may be the abdomen, the respiratory system, or the urinary tract.

[0198] One or more regional biomarkers can assist in identifying the region of infection. Hence, the method may further comprise:
[0199] determining the level of one or more regional biomarkers in the biological sample; and
[0200] determining the region of origin of infection on basis of the level of the one or more regional biomarkers in the biological sample.

[0201] The one or more regional biomarkers are preferably selected from one or more of:
[0202] (i) the group consisting of Cell growth regulator with EF hand domain protein 1 (CGRE1), Coagulation factor VIII (FA8), Phospholipid transfer protein (PLTP), Protein Z-dependent protease inhibitor (ZPI), Alpha-1-antichymotrypsin (AACT), Matrix metalloproteinase-9 (MMP9), Interleukin-1 receptor antagonist protein (IL1RA), Neutrophil collagenase (MMP8), Chitinase-3-like protein 1 (CH3L1), Interleukin-1 receptor-like 1 (ILRL1), CD177 antigen (CD177), Neutrophil gelatinase-associated lipocalin (NGAL), Lactotransferrin (TRFL), Interleukin-18-binding protein (I18BP), Metalloproteinase inhibitor 1 (TIMP1), Lipopolysaccharide-binding protein (LBP), Macrophage mannose receptor 1 (MRC1), IgGFc-binding protein (FCGBP), and Inter-alpha-inhibitor heavy chain H3 (ITIH3) for determining an infection originating from the abdomen; or
[0203] (ii) the group consisting of Neuronal growth regulator 1 (NEGR1), Apolipoprotein C-I (APOC1), Plasma serine protease inhibitor (IPSP), Serum amyloid A-4 protein (SAA4), Phosphatidylinositol-glycan-specific phospholipase D (PHLD), Prenylcysteine oxidase 1 (PCYOX), Coagulation factor XIII B chain (F13B), Inter-alpha-inhibitor heavy chain H1 (ITIH1), Inter-alpha-inhibitor heavy chain H2 (ITIH2), and Vitamin K-dependent protein S (PROS) for determining an infection originating from the respiratory system.

[0204] In a very preferred embodiment of the present invention, the subject is a human subject. The subject may be healthy or ill based on a suspected or confirmed diagnosis. A human subject may also be referred to as patient.

[0205] In a further aspect of the present invention, a method of monitoring a systemic inflammation of a subject is provided, wherein the method comprises:
[0206] i) performing the method of in vitro diagnosing a systemic inflammation or prognosing a risk of mortality of a subject with a systemic inflammation as stated supra; and
[0207] ii) repeating step i) at least one time.

[0208] Monitoring allows assessing the therapeutic success or therapeutic failure. This in turn allows individually adapting the therapy. Hence, the method may further comprise repeating step ii) until diagnosing the absence of the systemic inflammation, or for monitoring the therapeutic success or therapeutic failure.

[0209] In one embodiment, wherein repeating step ii) comprises performing step i) at least two times, such as at least three times, at least four times, at least five times, at least six times, at least seven times, at least eight times, at least nine times, at least 10 times, at least 12 times, at least 15 times, at least 20 times, at least 25 times, at least 30 times, or at least 35 times, preferably at least 25 times.

[0210] In another embodiment, the method comprises repeating step ii) within 12 hours, in particular within 24 hours, more particularly within 48 hours for therapy control (monitoring). Usually, the step is repeated every 48 hours. If a worsening of the symptoms is observed or the subject is at a higher risk, for example because the subject has acquired another infection, the step may be repeated every 24 hours or every 12 hours.

[0211] In another embodiment, monitoring the therapeutic success or therapeutic failure comprises repeating step i) at least one time after a treatment of the systemic inflammation has been initiated or completed, preferably repeating performing step i) until diagnosing the absence of the systemic inflammation.

[0212] Monitoring also includes monitoring a subject with a non-infectious systemic inflammation with respect to development of a sepsis and progression of disease.

[0213] In a further aspect of the invention, a method of treating a systemic inflammation is provided comprising:
[0214] i) performing the method as described above, and
[0215] ii) initiating a treatment against the systemic inflammation.

[0216] A sepsis may be diagnosed in step b) and treatment may be initiated in step ii) with an antibiotic agent. The antibiotic treatment may be a standard antibiotic treatment according to the prevailing national and international guidelines, for example a broad spectrum antibiotic. The treatment with an antibiotic agent combats an infection with bacteria.

[0217] In a further aspect of the present invention, an antibiotic agent for use in a method of treating an infection in a subject or treating a subject with a suspected infection is provided, wherein the infection is part of a bloodstream infection, systemic infection or sepsis and wherein the bloodstream infection, systemic infection or sepsis is diagnosed or monitored by the level of sVSIG4 in a biological sample. In a preferred embodiment, the bloodstream infection, systemic infection or sepsis, preferably the sepsis, is diagnosed or monitored by the method as defined above. In a further preferred embodiment, the subject has an increased level of sVSIG4. The level may be compared to a reference level of sVSIG4 in a non-infected control.

[0218] In a further aspect of the present invention, a method of distinguishing between SIRS and sepsis in a subject is provided, wherein the method comprises:
[0219] a) determining the level of sVSIG4 in a biological sample of said subject, and
[0220] b) comparing the level of sVSIG4 in the biological sample with a reference level of sVSIG4 in a biological sample of a subject suffering from SIRS,
[0221] wherein an increased level in the biological sample of step a) compared with the reference level of step b) indicates a sepsis in the subject of step a). The method is particularly performed as described herein.

[0222] SIRS in this context in particular includes SIRS with and without organ dysfunction.

[0223] In yet a further aspect of the invention, sVSIG4 is used as a biomarker for in vitro diagnosing a systemic inflammation in a subject or prognosing a risk of mortality of a subject with a systemic inflammation. sVSIG4 can be used as the sole biomarker or in combination with one or more further biomarkers. The method is particularly performed as described herein.

[0224] In yet a further aspect of the invention, a kit is provided comprising a binding molecule to sVSIG4 and a binding molecule to at least one further biomarker for the quantitative detection of sVSIG4 and the at least one further biomarker.

[0225] Preferably, the at least one further biomarker detected by means of the kit is CRP and/or PCT.

[0226] It is also preferred to combine the kit with the determination of the lactate level in the subject's biological sample.

[0227] In a preferred embodiment, the kit is used by means of whole blood, plasma or serum of a subject, preferably plasma.

[0228] The detection may be based on a chromogenic, fluorescent and/or luminescent reaction, and/or a chromatographic method.

[0229] The binding molecule in the kit is preferably selected from the group consisting of an antibody, an aptamer, and a nanobody.

[0230] Preferably, the kit is based on an ELISA or chromatography.

[0231] In a preferred embodiment, the kit is a quick test or POC (point-of-care) test. Thereby, a fast and reliable diagnosis and prognosis is possible.

### Further Embodiments

[0232] Embodiments of the present invention are described again and in further detail in the following. The present invention in particular discloses and provides for the following embodiments:
[0233] 1. A method of in vitro diagnosing a systemic inflammation or prognosing a risk of mortality of a subject with a systemic inflammation, wherein the method comprises
   [0234] c) determining the level of soluble V-set and immunoglobulin domain-containing protein 4 (sVSIG4) in a biological sample, and
   [0235] d) drawing a conclusion as to the diagnosis of a systemic inflammation or the prognosis of a risk of mortality of a subject with a systemic inflammation from the presence and/or level of sVSIG4.
[0236] 2. The method according to embodiment 1, wherein the systemic inflammation is caused by an infectious agent.
[0237] 3. The method according to embodiment 2, wherein the systemic inflammation caused by an infectious agent is a sepsis, a systemic infection, or a bloodstream infection, preferably a sepsis.
[0238] 4. The method according to embodiment 2 or 3, wherein the infectious agent is a bacterium, a fungus or a virus.
[0239] 5. The method according to embodiment 4, wherein the bacterium is a gram negative or a gram positive bacterium.
[0240] 6. The method according to embodiment 4, wherein the virus is influenza A virus, influenza B virus, respiratory syncytial virus (RSV), rhinovirus, and/or coronavirus, in particular severe acute respiratory syndrome coronavirus type 2 (SARS-COV2).
[0241] 7. The method according to embodiment 1, wherein the systemic inflammation is not caused by an infectious agent.
[0242] 8. The method according to embodiment 7, wherein the systemic inflammation not caused by an infectious agent is systemic inflammatory reaction syndrome (SIRS).
[0243] 9. The method according to one or more of embodiments 1 to 8, wherein a level of sVSIG4 in the biological sample of at least 20 pg/ml, at least 50 pg/ml, at least 100 pg/ml, at least 150 pg/ml, at least 200 pg/ml, or at least 250 pg/ml indicates the systemic inflammation.
[0244] 10. The method according to one or more of embodiments 1 to 8, wherein a level of sVSIG4 in the biological sample of at least 20 pg/ml, at least 50 pg/ml, at least 100 pg/ml, at least 150 pg/ml, at least 200 pg/ml, or at least 250 pg/ml and less than 100000 pg/ml, less than 50000 pg/ml, less than 12500 pg/ml, less than 10000 pg/ml, or less than 6000 pg/ml indicates the SIRS.
[0245] 11. The method according to one or more of embodiments 3 to 6, wherein a level of sVSIG4 in the biological sample of at least 200 pg/ml, at least 250 pg/ml, at least 300 pg/ml, at least 350 pg/ml, or at least 400 pg/ml indicates the bloodstream infection.
[0246] 12. The method according to one or more of embodiments 3 to 6, wherein a level of sVSIG4 in the biological sample of at least 500 pg/ml, at least 550 pg/ml, at least 600 pg/ml, at least 650 pg/ml, at least 700 pg/ml, at least 750 pg/ml, at least 1000 pg/ml, at least 1500 pg/ml, at least 2500 pg/ml, at least 3500 pg/ml, at least 5000 pg/ml, at least 7500 pg/ml, at least 10000 pg/ml, or at least 12500 pg/ml indicates the sepsis.
[0247] 13. The method according to one or more of embodiments 3 to 6, wherein a level of sVSIG4 in the biological sample of at least 1500 pg/ml, at least 5000 pg/ml, at least 10000 pg/ml, or at least 12500 pg/ml indicates the sepsis and discriminates between SIRS and sepsis.
[0248] 14. The method according to one or more of embodiments 1 to 8, wherein a level of sVSIG4 in the biological sample of at least 4500 pg/ml, at least 9000 pg/ml, at least 15000 pg/ml, at least 40000 pg/ml, or at least 50000 pg/ml indicates a risk of mortality of a subject with a systemic inflammation caused by an infectious agent of at least 50% within 28 days.
[0249] 15. The method according to one or more of embodiments 1 to 8, wherein a level of sVSIG4 in the biological sample of at least 70000 pg/ml, at least 75000 pg/ml, at least 80000 pg/ml, or at least 85000 pg/ml, indicates a risk of mortality of a subject with a systemic inflammation caused by an infectious agent of at least 30% within 28 days.
[0250] 16. The method according to one or more of embodiments 1 to 15, wherein sVSIG4 comprises the extracellular domain or a fragment of the extracellular domain of VSIG4.
[0251] 17. The method according to one or more of embodiments 1 to 16, wherein sVSIG4 does not comprise the transmembrane domain and cytoplasmic domain of VSIG4.
[0252] 18. The method according to embodiment 16 or 17, wherein VSIG4 is selected from the group consisting of VSIG4 isoform 1 (UniProt Identifier Q9Y279-1; SEQ ID NO: 1), VSIG4 isoform 2 (UniProt Identifier Q9Y279-2; SEQ ID NO: 2) and VSIG4 isoform 3 (UniProt Identifier Q9Y279-3; SEQ ID NO: 3) or has an amino acid sequence which is at least 90% identical to the amino acid sequence of VSIG4 isoform 1 (UniProt Identifier Q9Y279-1; SEQ ID NO: 1), VSIG4 isoform 2 (UniProt Identifier Q9Y279-2; SEQ ID NO: 2) or VSIG4 isoform 3 (UniProt Identifier Q9Y279-3; SEQ ID NO: 3).
[0253] 19. The method according to one or more of embodiments 16 to 18, wherein the extracellular domain comprises Ig-like domain 1 (SEQ ID NO: 4), or lg-like domain 1 (SEQ ID NO: 4) and Ig-like domain-2 (SEQ ID NO: 5), or the extracellular domain as defined in SEQ ID NO: 6.
[0254] 20. The method according to one or more of embodiments 1 to 19, wherein sVSIG4 is dissolved in the biological sample, in particular in the non-cellular fraction of the biological sample.
[0255] 21. The method according to one or more of embodiments 1 to 20, wherein the method further comprises:
   [0256] determining the level of one or more additional biomarkers in the biological sample; and
   [0257] in step b) drawing a conclusion as to the diagnosis of a systemic inflammation or the prognosis of a risk of mortality of a subject with a systemic inflammation from the presence and/or level of sVSIG4 in combination with the presence and/or level of the one or more additional biomarkers.
[0258] 22. The method according to embodiment 21, wherein the one or more additional biomarkers are selected from the group consisting of IgGFc-binding protein (FCGBP), GDNF family receptor alpha-2 (GFRA2), Carboxypeptidase D (CBPD), Asialoglycoprotein receptor 1 (ASGR1), Hypoxia upregulated protein 1 (HYOU1), Tenascin (TENA), Polymeric immunoglobulin receptor (PIGR), Sushi, von Willebrand factor type A, EGF and Pentraxin domain-containing protein 1 (SVEP1), Interleukin-1 receptor type 2 (IL1R2), Laminin subunit beta-1 (LAMB1), Endoplasmic reticulum chaperone BiP (BIP), Peroxidasin homolog (PXDN), Follistatin-related protein 1 (FSTL1), Leucine-rich alpha-2 glycoprotein (A2GL), Metalloproteinase inhibitor 1 (TIMP1), NPC intracellular cholesterol transporter 2 (NPC2), Peptidoglycan recognition protein 1 (PGRP1), Lactotransferrin (TRFL), Dystonin (DYST), Lipopolysaccharide-binding protein (LBP), Haptoglobin (HPT), Asialoglycoprotein receptor 2 (ASGR2), Non-secretory ribonuclease (RNAS2), Azurocidin (CAP7), Chitinase-3-like protein 1 (CH3L1), Tumor necrosis factor receptor superfamily member 1B (TNR1B), HLA class II histocompatibility antigen gamma chain (HG2A), Olfactomedin-4 (OLFM4), Leukocyte immunoglobulin-like receptor subfamily A member 3 (LIRA3), Insulin-like growth factor-binding protein 2 (IBP2), Growth/differentiation factor 15 (GDF 15), Laminin subunit alpha-2 (LAMA2), Tyrosine-protein phosphatase non-receptor type substrate 1 (SHPS1), Basigin (BASI), Fibroleukin (FGL2), Cathepsin Z (CATZ), E-selectin (LYAM2), Lymphatic vessel endothelial hyaluronic acid receptor 1 (LYVE1), Disintegrin and metalloproteinase domain-containing protein 9 (ADAM9), Desmocollin-2 (DSC2), Interleukin-1 receptor-like 1 (ILRL1), Matrix metalloproteinase-9 (MMP9), Cystatin-C(CYTC), Interleukin-18-binding protein (I18BP), Paired immunoglobulin-like type 2 receptor alpha (PILRA), Macrophage mannose receptor 1 (MRC1), Osteopontin (OSTP), Scavenger receptor cysteine-rich type 1 protein M130 (C163A), Integral membrane protein 2B (ITM2B), Fibrinogen-like protein 1 (FGL1), Serum amyloid A-1 protein (SAA1), Interleukin-1 receptor antagonist protein (IL1RA), Nucleobindin-1 (NUCB1), Golgi membrane protein 1 (GOLM1), Dystroglycan (DAG1), CD177 antigen (CD177), Alkaline phosphatase, tissue-nonspecific isozyme (PPBT), Neutrophil collagenase (MMP8), Myeloblastin (PRTN3), Neutrophil elastase (ELNE), Beta-1,4-galactosyltransferase 1 (B4GT1), C-reactive protein (CRP), WAP four-disulfide core domain protein 2 (WFDC2), Follistatin-related protein 3 (FSTL3), Ribonuclease pancreatic (RNAS1), Neutrophil gelatinase-associated lipocalin (NGAL), Serum amyloid A-2 protein (SAA2), Lithostathine-1-alpha (REG1A), Plasma kallikrein (KLKB1), Phosphatidylcholine-sterol acyltransferase (LCAT), Serotransferrin (TRFE), Procalcitonin (PCT)), Complement receptor type 2 (CR2), Voltage-dependent calcium channel subunit alpha-2/delta-1 (CA2D1) Indian hedgehog protein (IHH), Serum paraoxonase/lactonase 3 (PON3), Fibronectin (FINC), Beta-Ala-His-dipeptidase (CNDP1), Insulin-like growth factor-binding protein complex acid labile subunit (ALS), Phosphatidylinositol-glycan-specific phospholipase D (PHLD), Insulin-like growth factor-binding protein 3 (IBP3), Anthrax toxin receptor 1 (ANTR1), Neuronal growth regulator 1 (NEGR1), Plasma serine protease inhibitor (IPSP), Intelectin-1 (ITLN1), Kallistatin (KAIN), Fibroblast growth factor receptor 1 (FGFR1), Alpha-2-HS-glycoprotein (FETUA), Cholinesterase (CHLE), Afamin (AFAM), Cathepsin F (CATF), Cholesteryl ester transfer protein (CETP), Cadherin-related family member 5 (CDHR5), Inter-alpha-trypsin inhibitor heavy chain H2 (ITIH2), N-acetylmuramoyl-L-alanine amidase (PGRP2), Contactin-1 (CNTN1), Apolipoprotein(a) (APOA), Cell growth regulator with EF hand domain protein 1 (CGRE1), Coagulation factor VIII (FA8), Phospholipid transfer protein (PLTP), Protein Z-dependent protease inhibitor (ZPI), Alpha-1-antichymotrypsin (AACT), Vitamin K-dependent protein S (PROS), Coagulation factor XIII B chain (F13B), Prenylcysteine oxidase 1 (PCYOX), Serum amyloid A-4 protein (SAA4) Apolipoprotein C-I (APOC1), Prolyl endopeptidase FAP (SEPR), Dipeptidylpeptidase 4 (DPP4), Angiotensin-converting enzyme 2 (ACE2), Interleukin-1 receptor accessory protein (IL1AP), Di-N-acetylchitobiase (DIAC), Hepatocyte growth factor activator (HGFA), Selenoprotein P (SEPP1), A disintegrin and metalloproteinase with thrombospondin motifs 13 (ATS13), Monocyte differentiation antigen CD14 (CD14), Complement factor H-related protein 1 (FHR1), von Willebrand factor (VWF), Laminin subunit gamma-1 (LAMC1), Scavenger receptor class A member 5 (SCAR5), ADAMTS-like protein 4 (ATL4), Cullin-1 (CUL1), Pulmonary surfactant-associated protein B (PSPB), Neuroblastoma suppressor of tumorigenicity (NBL1), Ganglioside GM2 activator (SAP3), Protein disulfide isomerase CRELD1 (CREL1), Cadherin-related family member 2 (CDHR2), Chymotrypsin-like elastase family member 3B (CEL3B), Phosphoinositide-3-kinase-interacting protein 1 (P3IP1), Lithostathine-1-beta (REG1B), Kininogen-1 (KNG1), Versican core protein (CSPG2), EMILIN-2 (EMIL2), Carcinoembryonic antigen-related cell adhesion molecule 6 (CEAM6), Fibromodulin (FMOD), Beta-galactoside alpha-2,6-sialyltransferase 1 (SIAT1), Leukocyte immunoglobulin-like receptor subfamily B member 5 (LIRB5), Latent-transforming growth factor beta-binding protein 2 (LTBP2), Chromogranin-A (CMGA) and Adseverin (ADSV), Histidine-rich glycoprotein (HRG), Inter-alpha-trypsin inhibitor heavy chain H1 (ITIH1), and Inter-alpha-trypsin inhibitor heavy chain H3 (ITIH3), wherein in step b) a conclusion is drawn as to the diagnosis of a systemic inflammation.
[0259] 23. The method according to embodiment 21 or 22, wherein the one or more additional biomarkers in the biological sample are selected from one or more of the following:
   [0260] (i) Inter-alpha-trypsin inhibitor heavy chain H2 (ITIH2), Inter-alpha-trypsin inhibitor heavy chain H1 (ITIH1), Phosphatidylinositol-glycan-specific phospholipase D (PHLD), N-acetylmuramoyl-L-alanine amidase (PGRP2), Kallistatin (KAIN), Alpha-2-HS-glycoprotein (FETUA), Inter-alpha-trypsin inhibitor heavy chain H3 (ITIH3), Afamin (AFAM), Macrophage mannose receptor 1 (MRC1), Cholinesterase (CHLE), Insulin-like growth factor-binding protein complex acid labile subunit (ALS), Serotransferrin (TRFE), Phosphatidylcholine-sterol acyltransferase (LCAT), Beta-Ala-His dipeptidase (CNDP1), Plasma kallikrein (KLKB1), Alpha-1-antichymotrypsin (AACT), Monocyte differentiation antigen CD14 (CD14), Neutrophil gelatinase-associated lipocalin (NGAL), Hepatocyte growth factor activator (HGFA), Scavenger receptor cysteine-rich type 1 protein M130 (C163A), Fibronectin (FINC), Histidine-rich glycoprotein (HRG), and Alpha-1-antitrypsin (A1AT);
   [0261] (ii) Phosphatidylinositol-glycan-specific phospholipase D (PHLD), Kallistatin (KAIN), Alpha-2-HS-glycoprotein (FETUA), Afamin (AFAM), Macrophage mannose receptor 1 (MRC1), Cholinesterase (CHLE), Insulin-like growth factor-binding protein complex acid labile subunit (ALS), Beta-Ala-His dipeptidase (CNDP1), Neutrophil gelatinase-associated lipocalin (NGAL), Scavenger receptor cysteine-rich type 1 protein M130 (C163A), Plasma serine protease inhibitor (IPSP), Leucine-rich alpha-2-glycoprotein (A2GL), Lithostathine-1-alpha (REG1A), Lipopolysaccharide-binding protein (LBP), Lymphatic vessel endothelial hyaluronic acid receptor 1 (LYVE1), Insulin-like growth factor-binding protein 3 (IBP3), Complement receptor type 2 (CR2), Fibronectin (FINC), Asialoglycoprotein receptor 2 (ASGR2), Alkaline phosphatase, tissue-nonspecific isozyme (PPBT), Serum amyloid A-2 protein (SAA2), and Dipeptidylpeptidase 4 (DPP4);
   [0262] (iii) Inter-alpha-trypsin inhibitor heavy chain H2 (ITIH2), N-acetylmuramoyl-L-alanine amidase (PGRP2), and Monocyte differentiation antigen CD14 (CD14);
   [0263] (iv) Inter-alpha-trypsin inhibitor heavy chain H2 (ITIH2);
   [0264] (v) Phosphatidylinositol-glycan-specific phospholipase D (PHLD), Leucine-rich alpha-2-glycoprotein (A2GL), and Insulin-like growth factor-binding protein 3 (IBP3);
   [0265] (vi) Phosphatidylinositol-glycan-specific phospholipase D (PHLD);
   [0266] (vii) C-reactive protein (CRP);
   [0267] (viii) Procalcitonin (PCT);
   [0268] (ix) Lithostathine-1-alpha (REG1A);
   [0269] (x) Myeloblastin (PRTN3);
   [0270] (xi) CRP and PCT,
[0271] wherein in step b) a conclusion is drawn as to the diagnosis of a systemic inflammation.
[0272] 24. The method according to embodiment 21, wherein the one or more additional biomarkers are selected from the group consisting of Kininogen-1 (KNG1), Tenascin (TENA), Versican core protein (CSPG2), Cadherin-related family member 2 (CDHR2), EMILIN-2 (EMIL2), Osteopontin (OSTP), Tyrosine-protein phosphatase non-receptor type substrate 1 (SHPS1), Lithostathine-1-beta (REG1B), Carcinoembryonic antigen-related cell adhesion molecule 6 (CEAM6), Paired immunoglobulin-like type 2 receptor alpha (PILRA), HLA class II histocompatibility antigen gamma chain (HG2A), Scavenger receptor cysteine-rich type 1 protein M130 (C163A), Fibroleukin (FGL2), Follistatin-related protein 3 (FSTL3), Fibromodulin (FMOD), Beta-galactoside alpha-2,6-sialyltransferase 1 (SIAT1), Myeloblastin (PRTN3), Leukocyte immunoglobulin-like receptor subfamily B member 5 (LIRB5), N-acetylmuramoyl-L-alanine amidase (PGRP2), Interleukin-1 receptor-like 1 (ILRL1), Neutrophil gelatinase-associated lipocalin (NGAL), Latent-transforming growth factor beta-binding protein 2 (LTBP2), Interleukin-1 receptor antagonist protein (IL1RA), Chromogranin-A (CMGA), Phosphoinositide-3-kinase-interacting protein 1 (P3IP1), Ribonuclease pancreatic (RNAS1), Ganglioside GM2 activator (SAP3), Neutrophil elastase (ELNE), Adseverin (ADSV), Disintegrin and metalloproteinase domain-containing protein 9 (ADAM9), Lithostathine-1-alpha (REG1A), Nucleobindin-1 (NUCB1), and WAP four-disulfide core domain protein 2 (WFDC2),
[0273] wherein in step b) a conclusion is drawn as to the prognosis of a risk of mortality of a subject with a systemic inflammation.
[0274] 25. The method according to embodiment 21 or 22, wherein the one or more additional biomarkers in the biological sample are selected from one or more of the following:
   [0275] (i) Kininogen-1 (KNG1) and Tenascin (TENA);
   [0276] (ii) Versican core protein (CSPG2), Cadherin-related family member 2 (CDHR2), EMILIN-2 (EMIL2), Osteopontin (OSTP), Tyrosine-protein phosphatase non-receptor type substrate 1 (SHPS1), Lithostathine-1-beta (REG1B), Carcinoembryonic antigen-related cell adhesion molecule 6 (CEAM6), Paired immunoglobulin-like type 2 receptor alpha (PILRA), HLA class II histocompatibility antigen gamma chain (HG2A), Scavenger receptor cysteine-rich type 1 protein M130 (C163A), Fibroleukin (FGL2), Follistatin-related protein 3 (FSTL3), Fibromodulin (FMOD), Beta-galactoside alpha-2,6-sialyltransferase 1 (SIAT1), Myeloblastin (PRTN3), Leukocyte immunoglobulin-like receptor subfamily B member 5 (LIRB5), N-acetylmuramoyl-L-alanine amidase (PGRP2), Interleukin-1 receptor-like 1 (ILRL1), Neutrophil gelatinase-associated lipocalin (NGAL), Latent-transforming growth factor beta-binding protein 2 (LTBP2), Interleukin-1 receptor antagonist protein (IL1RA), Chromogranin-A (CMGA), Phosphoinositide-3-kinase-interacting protein 1 (P3IP1), Ribonuclease pancreatic (RNAS1), Ganglioside GM2 activator (SAP3), Neutrophil elastase (ELNE), Adseverin (ADSV), Disintegrin and metalloproteinase domain-containing protein 9 (ADAM9), Lithostathine-1-alpha (REG1A), Nucleobindin-1 (NUCB1), and WAP four-disulfide core domain protein 2 (WFDC2);
   [0277] (iii) Scavenger receptor cysteine-rich type 1 protein M130 (C163A), Kallistatin (KAIN), Macrophage mannose receptor 1 (MRC1), Lymphatic vessel endothelial hyaluronic acid receptor 1 (LYVE1), Cholinesterase (CHLE), Ribonuclease pancreatic (RNAS1), Phospahtidylinositol-glycan-specific phospholipase D (PHLD), Afamin (AFAM), Insulin-like growth factor-binding protein complex acid labile subunit (ALS), Neutrophil gelatinase-associated lipocalin (NGAL), Phosphoinositide-3-kinase-interacting protein 1 (P3IP1), Alpha-2-HS-glycoprotein (FETUA), Ganglioside GM2 activator (SAP3), Beta-Ala-His-dipeptidase (CNDP1), Paired immunoglobulin-like type 2 receptor alpha (PILRA), CD177 antigen (CD177), V-type proton ATPase subunit S1 (VAS1), Plasma serine protease inhibitor (IPSP), Follistatin-related protein 3 (FSTL3), Pulmonary surfactant-associated protein B (PSPB), Tumor necrosis factor receptor superfamily member 1B (TNR1B), WAP four-disulfide core domain protein 2 (WFDC2), Alkaline phosphatase, tissue-nonspecific isozyme (PPBT), and Metalloproteinase inhibitor 1 (TIMP1);
   [0278] (iv) C-reactive protein (CRP);
   [0279] (v) Procalcitonin (PCT);
   [0280] (vi) Lithostathine-1-alpha;
   [0281] (vii) CRP and PCT,
[0282] wherein in step b) a conclusion is drawn as to the prognosis of a risk of mortality of a subject with a systemic inflammation.
[0283] 26. The method according to one or more of embodiments 3 to 25, wherein a predictor based on the determination of the levels of sVSIG4 and CRP in the biological sample and calculated by −0.4268478×In(sVSIG4)−0.4500494×In(CRP)+5.927552 less than 3, preferably less than 0.5, preferably less than 0, more preferably less than −0.2 indicates the sepsis.
[0284] 27. The method according to one or more of embodiments 1 to 25, wherein a predictor based on the determination of the levels of sVSIG4 and CRP in the biological sample and calculated by −0.4268478×In(sVSIG4)−0.4500494×In(CRP)+5.927552 less than 1, preferably less than 0, more preferably less than −1 indicates a risk of mortality of a subject with a systemic inflammation, preferably a sepsis, of at least 50% within 28 days.
[0285] 28. The method according to one or more of embodiments 3 to 25, wherein a predictor based on the determination of the levels of sVSIG4 and myeloblastin (PRTN3) in the biological sample and calculated by −0.4331127×In(sVSIG4)−0.4901329×In(PRTN3)+9.942252 less than 2, preferably less than 1, more preferably less than −0.1 indicates the sepsis.
[0286] 29. The method according to one or more of embodiments 1 to 25, wherein a predictor based on the determination of the levels of sVSIG4 and myeloblastin (PRTN3) in the biological sample and calculated by −0.4331127×In(sVSIG4)−0.4901329×In(PRTN3)+9.942252 less than 0, preferably less than −1 indicates a risk of mortality of a subject with a systemic inflammation, preferably a sepsis, of at least 50% within 28 days.
[0287] 30. The method according to one or more of embodiments 1 to 25, wherein in step a) in addition to determining the level of sVSIG4, the level of one or more further soluble proteins in the biological sample is determined.
[0288] 31. The method according to one or more of embodiments 1 to 30, wherein the method includes further parameters for diagnosing a systemic inflammation, the further parameters being in particular Sequential Organ Failure Assessment (SOFA) score, Quick Sequential Organ Failure Assessment (qSOFA) score, Acute Physiology and Chronic Healthy Evaluation II (APACHE-II) score and/or Simplified Acute Physiology Score II (SAPS-II).
[0289] 32. The method according to one or more of embodiments 1 to 31, wherein the method comprises enriching glycosylated proteins in the biological sample.
[0290] 33. The method according to embodiment 32, wherein the enriching glycosylated proteins in the biological sample is performed prior to step a).
[0291] 34. The method according to one or more of embodiments 32 or 33, wherein enriching glycosylated proteins in the biological sample includes performing one or more separation steps with the biological sample, in particular prior to step a).
[0292] 35. The method according to embodiment 34, wherein the one or more separation steps include chromatographic separation, preferably affinity chromatographic separation.
[0293] 36. The method according to embodiment 35, wherein the affinity chromatographic separation is selected from the group consisting of lectin affinity chromatography, separation by hydrazide chemistry, hydrophilic interaction chromatography and immunoaffinity chromatography.
[0294] 37. The method according to one or more of embodiments 34 to 36, wherein proteins of the biological sample are enzymatically degraded in the one or more separation steps.
[0295] 38. The method according to one or more of embodiments 1 to 37, wherein step a) is performed by one or more methods selected from the group consisting of chromatography, spectrometry, electrophoresis, spectroscopy, biochemical assay and immunoassay, preferably spectrometry, in particular mass spectrometry, and/or immunoassay.
[0296] 39. The method according to embodiment 38, wherein the mass spectrometry is a liquid chromatography-mass spectrometry (LC-MS), LC-MS/MS or matrix-assisted laser desorption ionization-time of flight mass spectrometry (MALDI-TOF MS).
[0297] 40. The method according to embodiment 38 or 39, wherein the immunoassay is selected from one or more of the group consisting of enzyme-linked immunosorbent assay (ELISA), immunoscreening, lateral flow immunochromatographic assay, magnetic immunoassay and radio immunoassay, preferably ELISA.
[0298] 41. The method according to one or more of embodiments 1 to 40, wherein step a) comprises performing LC-MS, LC-MS/MS or MALDI-TOF MS and a subsequent step of analyzing the obtained data for determining the level of sVSIG4 in the biological sample.
[0299] 42. The method according to one or more of embodiments 1 to 41, wherein the method comprises:
   [0300] performing a depletion step and/or a fractionation step and/or enriching glycosylated proteins in the biological sample prior to step a); and
   [0301] performing mass spectrometry in step a) for determining the level of sVSIG4 in the biological sample.
[0302] 43. The method according to embodiment 42, wherein
   [0303] enriching glycosylated proteins comprises performing an affinity chromatographic separation step, in particular lectin affinity chromatography, separation by hydrazide chemistry or immunoaffinity chromatography;
   [0304] optionally, proteins of the biological sample are enzymatically degraded in the affinity chromatographic separation step.
[0305] 44. The method according to one or more of embodiments 1 to 43, wherein the biological sample is a body fluid sample.
[0306] 45. The method according to one or more of embodiments 1 to 44, wherein the biological sample is the non-cellular fraction of a biological sample.
[0307] 46. The method according to embodiment 44 or 45, wherein the body fluid sample is selected from one or more of the group consisting of whole blood, plasma, serum, synovial fluid, pleural effusion, lymphatic fluid, urine, liquor, cerebrospinal fluid, ascites, and bronchial lavage, and samples derived from the foregoing, in particular cell-free or cell-depleted samples derived from the foregoing samples by removing cells.
[0308] 47. The method according to one or more of embodiments 1 to 46, wherein the biological sample is selected from the group consisting of whole blood, plasma and serum, preferably plasma.
[0309] 48. The method according to one or more of embodiments 1 to 47, wherein the biological sample is a cell-free or cell-depleted sample.
[0310] 49. The method according to one or more of embodiments 1 to 48, wherein the biological sample is processed prior to step a), in particular by obtaining the non-cellular fraction of the biological sample.
[0311] 50. The method according to one or more of embodiments 1 to 49, wherein the biological sample is a body fluid, in particular whole blood, plasma or serum, and the biological sample is processed prior to step a).
[0312] 51. The method according to embodiment 49 or 50, wherein processing comprises cell separation or depletion and/or chromatography.
[0313] 52. The method according to one or more of embodiments 1 to 51, wherein additionally a conclusion is drawn as to the region of origin of the infection caused by the infectious agent.
[0314] 53. The method according to embodiment 52, wherein the region of origin of the infection caused by the infectious agent is the abdomen, the respiratory system, or the urinary tract.
[0315] 54. The method according to one or more of embodiments 52 or 43, wherein the method further comprises:
   [0316] determining the level of one or more regional biomarkers in the biological sample; and
   [0317] determining the region of origin of infection caused by the infectious agent on basis of the presence and/or level of the one or more regional biomarkers in the biological sample.
[0318] 55. The method according to embodiment 54, wherein the one or more regional biomarkers are selected from one or more of:
   [0319] (i) the group consisting of Cell growth regulator with EF hand domain protein 1 (CGRE1), Coagulation factor VIII (FA8), Phospholipid transfer protein (PLTP), Protein Z-dependent protease inhibitor (ZPI), Alpha-1-antichymotrypsin (AACT), Matrix metalloproteinase-9 (MMP9), Interleukin-1 receptor antagonist protein (IL1RA), Neutrophil collagenase (MMP8), Chitinase-3-like protein 1 (CH3L1), Interleukin-1 receptor-like 1 (ILRL1), CD177 antigen (CD177), Neutrophil gelatinase-associated lipocalin (NGAL), Lactotransferrin (TRFL), Interleukin-18-binding protein (I18BP), Metalloproteinase inhibitor 1 (TIMP1), Lipopolysaccharide-binding protein (LBP), Macrophage mannose receptor 1 (MRC1), IgGFc-binding protein (FCGBP), and Inter-alpha-inhibitor heavy chain H3 (ITIH3) for determining an infection originating from the abdomen; or
   [0320] (ii) the group consisting of Neuronal growth regulator 1 (NEGR1), Apolipoprotein C-I (APOC1), Plasma serine protease inhibitor (IPSP), Serum amyloid A-4 protein (SAA4), Phosphatidylinositol-glycan-specific phospholipase D (PHLD), Prenylcysteine oxidase 1 (PCYOX), Coagulation factor XIII B chain (F13B), Inter-alpha-inhibitor heavy chain H1 (ITIH1), Inter-alpha-inhibitor heavy chain H2 (ITIH2), and Vitamin K-dependent protein S (PROS) for determining an infection originating from the respiratory system.
[0321] 56. The method according to one or more of embodiments 1 to 55, wherein the subject is a human subject.
[0322] 57. A method of monitoring a systemic inflammation of a subject, wherein the method comprises:
   [0323] iii) performing the method of in vitro diagnosing a systemic inflammation or prognosing a risk of mortality of a subject with a systemic inflammation according to one or more of embodiments 1 to 56; and
   [0324] iv) repeating step i) at least one time.
[0325] 58. The method according to embodiment 57, wherein the method comprises repeating step ii) until diagnosing the absence of the systemic inflammation, or for monitoring the therapeutic success or therapeutic failure.
[0326] 59. The method according to embodiment 57 or 58, wherein repeating step ii) comprises performing step i) at least two times, such as at least three times, at least four times, at least five times, at least six times, at least seven times, at least eight times, at least nine times, at least 10 times, at least 12 times, at least 15 times, at least 20 times, at least 25 times, at least 30 times, or at least 35 times, preferably at least 25 times.
[0327] 60. The method according to one or more of embodiments 57 to 59, wherein the method comprises repeating step ii) within 12 hours, in particular within 24 hours, more particularly within 48 hours.
[0328] 61. The method according to embodiment 58, wherein monitoring the therapeutic success or therapeutic failure comprises repeating step i) at least one time after a treatment of the systemic inflammation has been initiated or completed, preferably repeating performing step i) until diagnosing the absence of the systemic inflammation.
[0329] 62. The method according to one or more of embodiments 57 to 61, wherein a subject with a systemic inflammation not caused by an infectious agent is monitored with respect to development of a sepsis.
[0330] 63. A method of treating a systemic inflammation comprising:
   [0331] i) performing the method according to one or more of embodiments 1 to 62, and
   [0332] ii) initiating a treatment against the systemic inflammation.
[0333] 64. The method according to embodiment 63, wherein a sepsis is diagnosed in step b) and treatment is initiated in step ii) of embodiment 63 with an antibiotic agent.
[0334] 65. An antibiotic agent for use in a method of treating an infection in a subject or treating a subject with a suspected infection, wherein the infection is part of a bloodstream infection, systemic infection or sepsis and wherein the bloodstream infection, systemic infection or sepsis is diagnosed or monitored by the level of sVSIG4 in a biological sample.
[0335] 66. The antibiotic agent for use in a method according to embodiment 65, wherein the subject has an increased level of sVSIG4 compared to a non-infected control.
[0336] 67. The antibiotic agent for use in a method according to one or more of embodiments 65 or 66, wherein the bloodstream infection, systemic infection or sepsis is diagnosed or monitored by the method as defined according to one or more of embodiments 1 to 62.
[0337] 68. A method of distinguishing between SIRS and sepsis in a subject, wherein the method comprises:
   [0338] a) determining the level of sVSIG4 in a biological sample of said subject, and
   [0339] b) comparing the level of sVSIG4 in the biological sample with a reference level of sVSIG4 in a biological sample of a subject suffering from SIRS,
   [0340] wherein an increased level in the biological sample of step a) compared with the reference level of step b) indicates a sepsis in the subject of step a).
[0341] 69. The method according to embodiment 68, wherein the method has the features as defined in one or more of embodiments 1 to 62.
[0342] 70. Use of sVSIG4 as a biomarker for in vitro diagnosing a systemic inflammation in a subject or prognosing a risk of mortality of a subject with a systemic inflammation.
[0343] 71. The use of embodiment 70, wherein the sVSIG4 is used in a method as defined according to one or more of embodiments 1 to 62.
[0344] 72. A kit comprising a binding molecule to sVSIG4 and a binding molecule to at least one further biomarker for the quantitative detection of sVSIG4 and the at least one further biomarker.
[0345] 73. The kit according to embodiment 72, wherein the detection is based on a chromogenic, fluorescent and/or luminescent reaction, and/or a chromatographic method.
[0346] 74. The kit according to embodiment 72 or 73, wherein the binding molecule is selected from the group consisting of an antibody, an aptamer, and a nanobody.
[0347] 75. The kit according to one or more of embodiments 72 to 74, wherein the kit is a quick test or POC (point-of-care) test.

[0348] This invention is not limited by the exemplary methods and materials disclosed herein, and any methods and materials similar or equivalent to those described herein can be used in the practice or testing of embodiments of this invention. Numeric ranges are inclusive of the numbers defining the range. The headings provided herein are not limitations of the various aspects or embodiments of this invention which can be read by reference to the specification as a whole.

[0349] As used in the subject specification, items and claims, the singular forms “a”, “an” and “the” include plural aspects unless the context clearly dictates otherwise. The terms “include,” “have,” “comprise” and their variants are used synonymously and are to be construed as non-limiting. Further components and steps may be present. Throughout the specification, where compositions are described as comprising components or materials, it is additionally contemplated that the compositions can in embodiments also consist essentially of, or consist of, any combination of the recited components or materials, unless described otherwise. Reference to “the disclosure” and “the invention” and the like includes single or multiple aspects taught herein; and so forth. Aspects taught herein are encompassed by the term “invention”.

[0350] It is preferred to select and combine preferred embodiments described herein and the specific subject-matter arising from a respective combination of preferred embodiments also belongs to the present disclosure.

### Examples

[0351] It should be understood that the following examples are for illustrative purpose only and are not to be construed as limiting this invention in any manner. The below examples demonstrate that sVSIG4 is suitable for use in a method of in vitro diagnosis of a systemic inflammation, in particular sepsis. Specifically, the examples show that sVSIG4 is a suitable biomarker for distinguishing a systemic inflammation caused by an infectious agent, such as a sepsis, from a systemic inflammation not caused by an infectious agent, such as SIRS. The examples further demonstrate that sVSIG4 is a suitable biomarker for use in a method of monitoring a systemic inflammation of a subject, in particular sepsis.

### Identification of Sepsis-Associated Biomarkers

[0352] For the purpose of identifying sepsis-associated biomarkers in patient plasma, plasma samples available from the biobank of Jena University Hospital were used, which were collected according to the sepsis-2 definition at Jena University Hospital, Department of Anesthesiology and Critical Care Medicine (sepsis criteria according to American College of Chest Physicians/Society of Critical Care Medicine consensus conference; see Chest 1992; 101(6): 1644-55). Patients in the intensive care unit with positive SIRS criteria who were neither suspected nor proven to have an underlying infection served as the control group. Patients were recruited by dividing them into four groups: Group 1—patients with SIRS, Group 2—patients with SIRS and organ dysfunction, Group 3—patients with severe sepsis, and Group 4—patients with septic shock. Samples from these patients were finally combined into 2 groups for proteomic analyses: a SIRS group with SIRS and SIRS+organ dysfunction subgroups, and a sepsis group with severe sepsis and septic shock subgroups. Patients with lower grade “sepsis” according to sepsis-2 definition were not analyzed.

[0353] For the analyses, citrated plasma samples from the earliest possible time (day 1 or 2) after sepsis diagnosis by the treating physician were selected to identify early markers of systemic infection and onset of severe sepsis or septic shock. In a first patient cohort, 264 patients, 143 with severe sepsis (n=26) or septic shock (n=117) and 121 patients with SIRS (n=53) or SIRS+organ dysfunction (n=68) were studied (see clinical parameters in Table 4). The two groups of patients showed no differences in age or body mass index (BMI). Slightly more men than women were recruited in both groups, but the groups did not differ statistically significantly. The critical care scoring systems SOFA-score, APACHE-score, and SAPS-score were significantly increased in the sepsis group. Fever, leukocytosis, hypoxemia, renal dysfunction, metabolic acidosis, and hypotension also occurred significantly more frequently in the sepsis group. PCT and CRP were significantly elevated in the sepsis group. Microbiological verification of infection was successful in 39.2% of all cases in the sepsis group, with gram-positive bacteria detected in 34.3%, gram-negative bacteria in 16.1%, and fungal infections in 7.7% of all positive cases. 53.8% of all sepsis patients had an infection focus in the respiratory tract, 35.0% in the abdomen, and 4.9% in the genitourinary tract. The mortality rates for in-hospital mortality and intensive care unit mortality were 44.8% and 33.5%, respectively, in the sepsis group and 14% and 9.0%, respectively, in the SIRS group.

TABLE 4
Clinical parameters of patients with sepsis or SIRS in the discovery cohort
(cohort 1) for the First Available Sample (day 1 or 2) for each patient.

| | SIRS group (n = 121) | | Sepsis group (n = 143) | | |
|---|---|---|---|---|---|
| | SIRS n = 53, | | Severe sepsis n = 26, | | |
| Parameters | SIRS + OD n = 68 | | Septic shock n = 117 | | p-value |
| Gender, female/male | 39/82 | (32%) | 51/92 | (36%) | 0.648^{§} |
| Age, median, (IQR range) | 66 | (58-73) | 67 | (54-74) | 0.598 |
| SOFA median (IQR) | 7.0 | (5-9) | 10.0 | (8-11) | <0.001 |
| APACHE median (IQR) | 14 | (10-18) | 20 | (15-24) | <0.001 |
| SAPS median (IQR) | 33 | (23-42) | 40 | (33-48) | <0.001 |
| WBC cells/mm3median (IQR) | 14.3 | (10.8-20.3) | 18.0 | (10.7-27.3) | <0.008 |
| PCT conc. median (IQR) | 2.0 | (0.5-6.0) | 3.3 | (1.5-10.4) | <0.001 |
| CRP conc. median (IQR) | 64.5 | (29.8-98.4) | 194 | (116-253) | <0.001 |
| Hospital mortality No. (%) | 17 | (14.0) | 64 | (44.8) | <0.001^{§} |
| ICU mortality No., (%) | 11 | (9.0) | 48 | (33.5) | <0.001^{§} |
| Died of sepsis No., (%) | 4 | (3.3) | 43 | (30.0) | <0.001^{§} |
| Fever No., (%) | 51 | (42.1) | 95 | (66.4) | <0.001^{§} |
| Tachycardia No., (%) | 102 | (84.3) | 129 90.2) | | 0.207^{§} |
| Tachypnea No., (%) | 75 | (62.0) | 96 | (67.1) | 0.457^{§} |
| Leukocytosis No., (%) | 70 | (57.8) | 110 | (76.9) | 0.001^{§} |
| Thrombocytopenia No., (%) | 32 | (26.4) | 32 | (22.4) | 0.532^{§} |
| Hypoxemia No., (%) | 65 | (53.7) | 124 | (86.7) | <0.001^{§} |
| Hypotension No., (%) | 74 | (61.2) | 135 | (94.4) | <0.001^{§} |
| Vasoactive drug treatment No., (%) | 35 | (28.9) | 108 | (75.5) | <0.001^{§} |
| Renal dysfunction No., (%) | 22 | (18.2) | 71 | (49.7) | <0.001^{§} |
| Metabolic acidosis No., (%) | 26 | (21.5) | 54 | (37.8) | 0.006^{§} |
| Bilirubin sample day >20 μM | 34 | (28.1) | 64 | (44.8) | |
| Bilirubin conc. (median (IQR) | 13.9 | (10.1-20.3) | 18 | (12.05-31) | <0.001 |
| Lactate sample day > 2 mmol litre⁻¹ | 74 | (61.2) | 84 | (58.7) | |
| Lactat conc. median (IQR) | 2.4 | (1.4-3.7) | 2.2 | (1.5-3.8) | 0.709 |
| Microbiology (No. positive) | | | 56 | (39.2) | |
| Gram positive No., (%) | | | 49 | (34.3) | |
| Gram negative No., (%) | | | 23 | (16.1) | |
| Fungi No., (%) | | | 11 | (7.7) | |
| Focus | | | | | |
| Respiratory | | | 77 | (53.8) | |
| Abdominal | | | 50 | (35.0) | |
| Urinary | | | 7 | (4.9) | |
| Other | | | 20 | (14.0) | |

Data are median and interquartile range (IQR) or counts, No. (%).
Definition of abbrevations: APACHE = Acute Physiology and Chronic Healthy Evaluation II, SOFA = Sequential Organ Failure Assessment, SAPS = Simplified Acute Physiology Score II, PCT = Procalcitonin (ng/ml), CRP = C-reactive protein (mg/l), WBC: white blood count, ICU = intensive care unit.
Statistical analysis was done by Mann-Whitney-U-Test or ^{§}Chi-square test.

[0354] In order to also detect proteins which are present in lower amounts, glycosylated proteins in the plasma samples are enriched. Taking advantage of sugar residues covalently linked to the protein scaffold, the glycosylated proteins are coupled to a solid phase (Sepharose) via so-called hydrazide chemistry after mild oxidation. Non-glycosylated proteins are washed away and the enriched preparation of plasma glycoproteins can be processed for proteomic studies and mass spectrometry. The glycoproteins covalently linked to sepharose are reduced at cysteine residues, these are stabilized in their oxidation state by alkylation, and after extensive washing the glycoproteins are cut into peptides at the solid phase by a protease (trypsin), which can now be freely removed in the supernatant of the sepharose. A few peptides remain on the sepharose, which still carry sugar residues that ensure linkage to the sepharose. By adding another enzyme, PNGaseF, sugar residues of the most common type of glycosylation, known as N-glycosylation, can be cleaved directly from the peptide portion of the protein, allowing even these last peptides of the glycoproteins to enter solution and become accessible to MS analysis. At the previously used N-glycosylation site released by PNGases, an asparagine is converted by deamination to an aspartate, which can be detected by the mass change and subsequent mass spectrometric analysis. The resulting two peptide fractions of a plasma sample (trypsin and PNGaseF peptides) are separated by reversed-phase liquid chromatography and analyzed by mass spectrometry (LC-MS/MS), providing good sensitivity for glycoproteins present in low concentrations due to the low complexity of the samples (especially the PNGaseF peptide fraction). The results of both fractions are again combined in one sample in the subsequent software-assisted calculation of the raw data (FIG. 1). The result is the glycoprotein profile of the plasma sample, with a few non-glycosylated proteins that were not completely removed as contaminants. Modern mass spectrometry, in addition to identifying the peptides and proteins present in the sample, also provides quantitative values for the identified peptides. These can be transferred into quantitative values for the individual proteins contained in the sample via the software packages used to analyze the samples. The analysis software used, MaxQuant (version 1.5.5.1), calculates the relative concentration of proteins and gives the abundance as a so-called label-free-quantity (LFQ) value. In the final result, result lists of the identified proteins with their relative quantitative values for the individual proteins in the sample are obtained, which can be further used and compared for statistical considerations.

[0355] After analysis of the 264 plasma samples from the Discovery cohort, a total of 997 different proteins in the samples in the entire data set were identified, including 731 glycoproteins (Table 6 below).

[0356] On average, 685±40 plasma proteins were identified in the plasma samples of the sepsis group and 663±35 in the SIRS group (FIG. 2A). 209 glycoproteins could be identified and quantified in 100% of all patient samples, and 498 glycoproteins could be found in ≥50% of all patient samples (FIG. 2B). A comparison with quantitative values for plasma proteins of the Human Plasma Protein Consortium shows that the plasma proteins identified with 50% reproducibility are in the concentration range of 0.1-1 ng/ml (FIG. 2C), which corresponds to a very good sensitivity of the method.

[0357] Comparison of quantitative values for five selected glycoproteins with 100% detection reproducibility covering a concentration range of 5 orders of magnitude (LFQ values) showed that label-free-quantity (LFQ) values for these proteins in samples from individual critically ill patients showed comparable variance (FIG. 2D). That is, reproducibility over the measurement range was high, with standard deviations (SD) ranging from 33.4-57.1%, with a slight tendency toward higher standard deviations at lower LFQ intensities (FIG. 2E).

[0358] A principal component analysis (PCA) showed that there are criteria in the data set that allow differentiating the SIRS group from the sepsis group on the basis of variance. The proportion of the first principal component is 7.12%. The following statistical analysis of the patient plasma samples showed that a surprising number of significantly different abundant proteins were detectable in the plasma samples of the SIRS and sepsis patient groups. A total of 312 proteins were significantly unequally expressed (t-test, p_{adjusted}<0.05) in the two groups, but many of these were expressed with only a minor fold change (FC) between the two groups, with values less than a doubling or a halving (FC≤2). 194 plasma proteins showed increased and 118 showed decreased abundance in the sepsis group compared with the SIRS group. 127 proteins showed a significant difference in intensity with FCs of >2. The significantly different abundant plasma proteins identified in the samples from sepsis patients and SIRS patients represent the plasma protein signature of sepsis detected and identified by this untargeted proteomic approach in the Discovery cohort.

[0359] Identification of sVSIG4 in the validation cohort Results from the 264-patient discovery cohort were then compared with results from a second, 96-patient cohort for verification (validation cohort, SIRS group: n=55, including 30 with SIRS and 26 with SIRS+organ dysfunction or sepsis group: n=41, including 7 with severe sepsis and 34 with septic shock, see also Table 5).

TABLE 5
Clinical parameters of patients with sepsis or SIRS in the validation
cohort for the first available sample for each patient.

| | SIRS group (n = 55) | | Sepsis group (n = 41) | | |
|---|---|---|---|---|---|
| | SIRS n = 53, | | Severe Sepsis n = 7 | | |
| Parameters | SIRS + OD = 68 | | Septic shock n = 34 | | p-value |
| Gender, female/male | 17/38 | (31%) | 7/34 | (17%) | 0.190^{§} |
| Age, median, (IQR range) | 67 | (59-73) | 67 | (59-74) | 0.882 |
| SOFA median (IQR) | 8 | (6-9) | 10 | (8-13) | 0.001 |
| APACHE median (IQR) | 14 | (12-19) | 19 | (16-22) | <0.001 |
| SAPS median (IQR) | 35 | (31-45) | 40 | (32-50) | 0.172 |
| WBC cells/mm3median | 14.4 | (12.7-17.8) | 11.1 | (0.6-14.8) | 0.024 |
| (IQR) | | | | | |
| PCT conc. median (IQR) | 0.7 | (0.3-3.0) | 7.4 | (3.3-20.7) | <0.001 |
| CRP conc. median (IQR) | 26 | (9-51) | 183 | (84-249) | <0.001 |
| Hospital mortality No | 14 | (25.4) | 18 | (43.9) | 0.093^{§} |
| (%) | | | | | |
| ICU mortality No, (%) | 13 | (23.6) | 17 | (41) | 0.064^{§} |
| Died of sepsis No, (%) | 3 | (5.4) | 16 | (39.0) | <0.001^{§} |

Data are median and interquartile range (IQR) or counts, No. (%).
Definition of abbrevations: APACHE = Acute Physiology and Chronic Healthy Evaluation II, SOFA = Sequential Organ Failure Assessment, SAPS = Simplified Acute Physiology Score II, PCT = Procalcitonin (ng/ml), CRP = C-reactive protein (mg/l), WBC: white blood count, ICU = intensive care unit.
Statistical analysis was done by Mann-Whitney-U-Test unless otherwise specified.
^{§}Chi-square test.

[0360] Also in this cohort, SOFA-score, APACHE ii-score, CRP- and PCT-levels were significantly higher in the sepsis group than in the SIRS group, whereas mortality was only slightly higher in the sepsis group than in the SIRS group. The plasma samples in the Validation cohort were processed as the plasma samples in the Discovery cohort. In contrast to the analyses of the Discovery cohort, the LC-MS/MS analyses of the Validation cohort were performed by triplicate measurements (technical triplicates) to increase the sensitivity and reproducibility of peptide and protein identification in the samples of the Validation cohort.

[0361] Of the 987 proteins, including 695 glycoproteins, identified in the validation cohort (Table 6), 294 plasma proteins differed significantly when compared between the sepsis and SIRS groups, including 193 with higher concentration or abundance and 101 with lower concentration or abundance (FIG. 4).

TABLE 6
Peptide and Protein Identifications
in Discovery and Validation Cohorts

| | Discovery Cohort | Validation Cohort |
|---|---|---|
| | (Cohort-1, n = 264) | (Cohort-2, n = 96) |
| Total protein IDs | 997 | 987 |
| Total peptide IDs | 11870 | 11749 |
| Total glycoprotein IDs | 731 | 695 |
| Protein IDs in SIRS group | 663 ± 35 | 769 ± 35 |
| Protein IDs in sepsis | 685 ± 40 | 787 ± 30 |
| group | | |
| Peptide IDs in SIRS group | 4644 ± 335 | 5907 ± 419 |
| Peptide IDs in sepsis | 4783 ± 436 | 5746 ± 787 |
| group | | |

[0362] Comparing the two cohorts, a total of 199 plasma proteins showed significantly different concentration or abundance in both cohorts (FIG. 5A) and a total of 122 plasma proteins showed concurrent higher and 76 plasma proteins showed concurrent lower abundance or concentration in the sepsis group (FIGS. 5B and 5C). One plasma protein showed different trends. 183 of the 199 plasma proteins with significantly different abundance in the SIRS and sepsis groups are annotated as glycoproteins in the UniProt database; for the remaining 16 proteins (8%) with different expression in the SIRS and sepsis groups, no glycosylation is known to date. Among these 16 plasma proteins were C-reactive protein (CRP), detected at higher levels in the sepsis group, and the acute-phase proteins serum amyloid protein-1 (SAA1) and serum amyloid protein-2 (SAA2). Surprisingly, the soluble protein V-set and immunoglobulin domain-containing protein 4 (sVSIG4), a protein annotated as non-glycosylated, showed the greatest fold change between the sepsis and SIRS groups of all detected plasma proteins in both the Discovery cohort and the Validation cohort. In both cohorts, the protein was detectable at significantly elevated levels in the sepsis patient samples (Table 7).

TABLE 7
Protein accession numbers (protein ID), entry name, p−value, fold changes (FC),
and peptide numbers of significantly differentially abundant proteins in SIRS
and sepsis patients identified in the discovery cohort and in the Validation cohort.
The protein IDs and entry names were retrieved from the UniProt database with release number
2016_04. The entry names can alternatively have the suffix “_HUMAN”; with
and without the suffix the same proteins are meant.

| | | | Discovery cohort | | | Validation cohort | | |
|---|---|---|---|---|---|---|---|---|
| Protein | Entry | | −Log (p- | (log2) | Pep- | −Log (p- | (log2) | Pep- |
| ID | name | Glycoprotein | value) | FC | tides | value) | FC | tides |
| O95954 | FTCD | no | n.s. | n.s. | n.s. | 2.85228 | −2.63627 | 5 |
| P20023 | CR2 | yes | 10.85869 | −2.54925 | 7 | 2.82939 | −1.40195 | 7 |
| P13533 | MYH6 | no | n.s. | n.s. | n.s. | 2.03800 | −2.13309 | 4 |
| Q460N5 | PAR14 | no | n.s. | n.s. | n.s. | 3.41223 | −2.08325 | 6 |
| Q96BZ4 | PLD4 | yes | n.s. | n.s. | n.s. | 4.57912 | −1.91356 | 5 |
| Q9BUN1 | MENT | no | n.s. | n.s. | n.s. | 7.05859 | −1.87653 | 3 |
| P01815 | HV270 | no | n.s. | n.s. | n.s. | 2.87848 | −1.85459 | 3 |
| P48668 | K2C6C | no | n.s. | n.s. | n.s. | 2.17547 | −1.73105 | 24 |
| Q58EX2 | SDK2 | yes | n.s. | n.s. | n.s. | 2.77593 | −1.72234 | 13 |
| Q12884 | SEPR | yes | 5.54315 | −1.62576 | 8 | n.s. | n.s. | n.s. |
| P54289 | CA2D1 | yes | 6.44915 | −1.57349 | 7 | 3.34510 | −1.95818 | 9 |
| Q86WI1 | PKHL1 | yes | n.s. | n.s. | n.s. | 2.85831 | −1.54880 | 14 |
| Q14623 | IHH | yes | 6.26138 | −1.48455 | 4 | 6.23053 | −2.49334 | 3 |
| Q15166 | PON3 | yes | 10.15695 | −1.43075 | 9 | 5.79752 | −0.81345 | 11 |
| P80748 | LV321 | no | n.s. | n.s. | n.s. | 2.16690 | −1.40744 | 4 |
| Q16620 | NTRK2 | yes | 8.07698 | −1.39460 | 5 | n.s. | n.s. | n.s. |
| P02751 | FINC | yes | 3.98355 | −1.36884 | 125 | 3.53520 | −1.39887 | 132 |
| Q9H4A9 | DPEP2 | yes | 5.31958 | −1.34774 | 9 | n.s. | n.s. | n.s. |
| Q96KN2 | CNDP1 | yes | 17.06681 | −1.32284 | 23 | 5.77563 | −0.74380 | 26 |
| O15394 | NCAM2 | yes | n.s. | n.s. | n.s. | 2.34320 | −1.31108 | 6 |
| P06733 | ENOA | no | n.s. | n.s. | n.s. | 2.06702 | −1.30352 | 3 |
| P00488 | F13A | yes | 9.53807 | −1.30220 | 16 | n.s. | n.s. | n.s. |
| P35858 | ALS | yes | 21.60502 | −1.27939 | 24 | 5.61257 | −1.14802 | 25 |
| P80108 | PHLD | yes | 33.38612 | −1.26073 | 31 | 7.75516 | −0.96839 | 34 |
| Q08722 | CD47 | yes | n.s. | n.s. | n.s. | 2.11478 | −1.21427 | 2 |
| P17301 | ITA2 | yes | n.s. | n.s. | n.s. | 4.41517 | −1.21321 | 7 |
| P17936 | IBP3 | yes | 14.25121 | −1.19441 | 10 | 5.01541 | −0.72078 | 9 |
| Q9H6X2 | ANTR1 | yes | 3.55618 | −1.18447 | 5 | 4.07624 | −2.21770 | 5 |
| P02724 | GLPA | yes | n.s. | n.s. | n.s. | 3.09220 | −1.13304 | 1 |
| Q7Z3B1 | NEGR1 | yes | 3.05653 | −1.11955 | 3 | 1.90726 | −1.17813 | 3 |
| P06727 | APOA4 | yes | 2.87506 | −1.11356 | 20 | n.s. | n.s. | n.s. |
| P27487 | DPP4 | yes | 9.67789 | −1.09836 | 17 | 4.19121 | −0.58980 | 16 |
| P05154 | IPSP | yes | 16.13163 | −1.09771 | 18 | 12.07452 | −1.21809 | 17 |
| Q8WWA0 | ITLN1 | yes | 5.52307 | −1.09392 | 5 | 4.15089 | −1.61798 | 5 |
| P29622 | KAIN | yes | 29.25833 | −1.08233 | 27 | 15.69186 | −1.11925 | 28 |
| Q9Y6Z7 | COL10 | yes | 2.93052 | −1.06047 | 5 | n.s. | n.s. | n.s. |
| P11362 | FGFR1 | yes | 1.98596 | −1.05969 | 6 | 3.52916 | −1.03325 | 7 |
| P02765 | FETUA | yes | 27.51895 | −1.04856 | 21 | 13.47822 | −1.02510 | 24 |
| P06276 | CHLE | yes | 24.88774 | −1.04756 | 24 | 8.39287 | −0.80198 | 25 |
| Q5T749 | KPRP | no | n.s. | n.s. | n.s. | 2.01231 | −1.03945 | 10 |
| P05556 | ITB1 | yes | 3.31770 | −1.02023 | 9 | n.s. | n.s. | n.s. |
| Q9P121 | NTRI | yes | n.s. | n.s. | n.s. | 2.05303 | −1.01654 | 3 |
| P43652 | AFAM | yes | 27.00885 | −1.01600 | 32 | 8.37722 | −0.79478 | 43 |
| Q9UBX1 | CATF | yes | 3.97709 | −1.00228 | 3 | 5.21468 | −1.42816 | 5 |
| P11597 | CETP | yes | 7.08541 | −0.98447 | 20 | 6.91503 | −1.18542 | 21 |
| Q15113 | PCOC1 | yes | 5.22984 | −0.97550 | 14 | 2.62138 | −0.62662 | 13 |
| P12821 | ACE | yes | 5.35372 | −0.97334 | 11 | n.s. | n.s. | n.s. |
| Q9HBB8 | CDHR5 | yes | 7.12981 | −0.96951 | 8 | 3.25375 | −0.93980 | 7 |
| Q76LX8 | ATS13 | yes | 16.14614 | −0.94897 | 22 | 4.24615 | −0.49812 | 25 |
| P07711 | CATL1 | yes | 1.79108 | −0.94650 | 4 | n.s. | n.s. | n.s. |
| P19823 | ITIH2 | yes | 40.33277 | −0.94269 | 34 | 9.43589 | −0.87866 | 42 |
| Q16853 | AOC3 | yes | 2.71186 | −0.94258 | 11 | 2.73369 | −0.56871 | 10 |
| P00533 | EGFR | yes | 5.40367 | −0.93467 | 8 | n.s. | n.s. | n.s. |
| Q96PD5 | PGRP2 | yes | 29.47285 | −0.93098 | 24 | 9.89650 | −0.84622 | 27 |
| Q12860 | CNTN1 | yes | 4.95790 | −0.90772 | 14 | 5.84927 | −1.00132 | 13 |
| Q9Y274 | SIA10 | yes | 2.35444 | −0.90247 | 3 | n.s. | n.s. | n.s. |
| P08519 | APOA | yes | 1.90884 | −0.90012 | 34 | 3.62501 | −1.77782 | 39 |
| P13647 | K2C5 | yes | 2.35589 | −0.89434 | 27 | 1.87966 | −1.15309 | 18 |
| Q7Z7M0 | MEGF8 | yes | 7.33149 | −0.89376 | 14 | 1.88272 | −0.30747 | 12 |
| P02766 | TTHY | yes | 12.81991 | −0.89057 | 11 | 2.88836 | −0.54172 | 13 |
| P27918 | PROP | yes | 7.81230 | −0.89035 | 11 | 6.68418 | −0.69617 | 10 |
| Q04756 | HGFA | yes | 19.63287 | −0.88573 | 17 | 5.34487 | −0.56985 | 18 |
| P01880 | IGHD | yes | 2.34898 | −0.87326 | 12 | n.s. | n.s. | n.s. |
| P06396 | GELS | yes | 9.66758 | −0.86256 | 22 | n.s. | n.s. | n.s. |
| P13591 | NCAM1 | yes | 10.65726 | −0.85821 | 14 | 4.07688 | −0.38527 | 14 |
| Q8IWV2 | CNTN4 | yes | 4.86353 | −0.82460 | 7 | n.s. | n.s. | n.s. |
| Q9UGM5 | FETUB | yes | 16.09321 | −0.82153 | 15 | 6.87482 | −0.76816 | 13 |
| P27169 | PON1 | yes | 18.00233 | −0.81690 | 23 | 6.34383 | −0.66667 | 27 |
| O95445 | APOM | yes | 17.44955 | −0.81240 | 13 | 4.39319 | −0.51614 | 13 |
| Q8NI99 | ANGL6 | yes | 2.62265 | −0.80884 | 5 | 1.81205 | −0.99913 | 2 |
| Q6P179 | ERAP2 | yes | 2.26940 | −0.80323 | 8 | n.s. | n.s. | n.s. |
| P01775 | HV323 | yes | 1.99527 | −0.79815 | 3 | n.s. | n.s. | n.s. |
| P02647 | APOA1 | yes | 8.48704 | −0.79694 | 17 | n.s. | n.s. | n.s. |
| Q8TDL5 | BPIB1 | yes | 1.94158 | −0.79356 | 12 | 5.54757 | −2.06991 | 9 |
| Q5SRE5 | NU188 | yes | 1.83948 | −0.78328 | 4 | n.s. | n.s. | n.s. |
| P04180 | LCAT | yes | 20.23253 | −0.76640 | 16 | 6.06947 | −0.63050 | 18 |
| P49908 | SEPP1 | yes | 16.10852 | −0.75953 | 12 | 6.41766 | −0.73873 | 15 |
| P11279 | LAMP1 | yes | n.s. | n.s. | n.s. | 2.29629 | −0.73910 | 6 |
| P01619 | KV320 | no | n.s. | n.s. | n.s. | 1.78039 | −0.73889 | 3 |
| P35579 | MYH9 | yes | 4.35518 | −0.73187 | 23 | n.s. | n.s. | n.s. |
| P19827 | ITIH1 | yes | 35.36591 | −0.73096 | 45 | 8.36351 | −0.57664 | 50 |
| Q9UHG3 | PCYOX | yes | 11.16822 | −0.72818 | 18 | 5.29774 | −0.55815 | 19 |
| P02787 | TRFE | yes | 26.31718 | −0.72390 | 95 | 13.4782 | −0.76254 | 95 |
| Q9NZK5 | ADA2 | yes | 2.12870 | −0.71341 | 10 | n.s. | n.s. | n.s. |
| Q9Y646 | CBPQ | yes | 3.63157 | −0.71127 | 4 | n.s. | n.s. | n.s. |
| P05452 | TETN | yes | 12.08175 | −0.68835 | 10 | 3.29132 | −0.44206 | 11 |
| Q9NPH3 | IL1AP | yes | 5.34132 | −0.68182 | 18 | 3.62798 | −0.48825 | 12 |
| P04070 | PROC | yes | 14.65624 | −0.66887 | 15 | 4.66803 | −0.60382 | 13 |
| P04196 | HRG | yes | 18.75544 | −0.66042 | 29 | 7.17119 | −0.63990 | 30 |
| P03952 | KLKB1 | yes | 20.47325 | −0.65868 | 38 | 9.36433 | −0.69100 | 40 |
| P09172 | DOPO | yes | 2.52992 | −0.65210 | 21 | n.s. | n.s. | n.s. |
| P55056 | APOC4 | yes | 5.70976 | −0.63621 | 6 | 2.11000 | −0.49342 | 6 |
| P05546 | HEP2 | yes | 17.64180 | −0.62925 | 33 | 5.83125 | −0.54271 | 34 |
| Q92496 | FHR4 | yes | n.s. | n.s. | n.s. | 1.78953 | −0.61723 | 16 |
| P08887 | IL6RA | yes | n.s. | n.s. | n.s. | 1.84871 | −0.61502 | 8 |
| Q6YHK3 | CD109 | yes | 4.14834 | −0.61078 | 19 | 2.73926 | −0.42499 | 21 |
| P23467 | PTPRB | yes | 1.72869 | −0.59501 | 6 | 1.87443 | −0.35949 | 10 |
| P05160 | F13B | yes | 17.63693 | −0.58714 | 31 | 6.55158 | −0.51882 | 32 |
| O14791 | APOL1 | yes | n.s. | n.s. | n.s. | 3.02746 | −0.55905 | 9 |
| P05090 | APOD | yes | 7.89774 | −0.55061 | 15 | n.s. | n.s. | n.s. |
| Q9HDC9 | APMAP | yes | 6.16854 | −0.54676 | 13 | n.s. | n.s. | n.s. |
| O75882 | ATRN | yes | 19.06558 | −0.53353 | 50 | 7.56905 | −0.48680 | 52 |
| P02656 | APOC3 | yes | 3.04817 | −0.52581 | 10 | 2.44700 | −0.70887 | 10 |
| P02654 | APOC1 | no | 3.21785 | −0.52463 | 5 | 4.89368 | −0.86199 | 5 |
| O00533 | NCHL1 | yes | 7.28459 | −0.52236 | 25 | n.s. | n.s. | n.s. |
| P55290 | CAD13 | yes | 3.14546 | −0.51940 | 15 | n.s. | n.s. | n.s. |
| P00748 | FA12 | yes | 8.45979 | −0.50957 | 27 | 3.84583 | −0.37897 | 27 |
| Q9NQ79 | CRAC1 | yes | 2.38547 | −0.48997 | 12 | 4.14075 | −0.70276 | 14 |
| Q9NY97 | B3GN2 | yes | 2.41644 | −0.48187 | 8 | 2.09263 | −0.59074 | 7 |
| P43251 | BTD | yes | 11.07057 | −0.46239 | 17 | 9.66522 | −0.48062 | 18 |
| P00747 | PLMN | yes | 12.61206 | −0.45914 | 52 | 3.72903 | −0.26781 | 58 |
| P00739 | HPTR | no | 5.28272 | −0.45765 | 34 | 2.18900 | −0.41788 | 33 |
| P22105 | TENX | yes | 3.59435 | −0.45302 | 37 | n.s. | n.s. | n.s. |
| Q01459 | DIAC | yes | 2.43474 | −0.45216 | 10 | 4.21704 | −0.76352 | 10 |
| P01625 | KV401 | yes | 3.78905 | −0.45189 | 4 | n.s. | n.s. | n.s. |
| P04114 | APOB | yes | 4.70135 | −0.42850 | 327 | 3.63876 | −0.44486 | 358 |
| P08709 | FA7 | yes | 2.76795 | −0.41424 | 11 | 3.24669 | −0.71626 | 10 |
| P02768 | ALBU | yes | 3.26136 | −0.39802 | 92 | n.s. | n.s. | n.s. |
| P43121 | MUC18 | yes | 2.44156 | −0.39630 | 17 | n.s. | n.s. | n.s. |
| Q12913 | PTPRJ | yes | 3.68260 | −0.39553 | 17 | n.s. | n.s. | n.s. |
| P01008 | ANT3 | yes | 12.91435 | −0.38193 | 49 | 4.41999 | −0.28158 | 53 |
| P01042 | KNG1 | yes | 14.29681 | −0.37394 | 38 | 7.96298 | −2.64147 | 37 |
| Q16610 | ECM1 | yes | 7.27676 | −0.35521 | 25 | 2.12493 | −0.24314 | 21 |
| O75144 | ICOSL | yes | 2.06043 | −0.35451 | 8 | 1.89668 | −0.41756 | 8 |
| P01023 | A2MG | yes | 6.98337 | −0.34708 | 128 | n.s. | n.s. | n.s. |
| P01613 | KVD33 | yes | 2.20305 | −0.34058 | 2 | n.s. | n.s. | n.s. |
| P10909 | CLUS | yes | 7.75577 | −0.32917 | 31 | 2.18959 | −0.21784 | 39 |
| P00734 | THRB | yes | 8.24632 | −0.29782 | 50 | 3.34416 | −0.32133 | 50 |
| P13473 | LAMP2 | yes | n.s. | n.s. | n.s. | 1.88010 | −0.29219 | 13 |
| P01860 | IGHG3 | yes | 1.97363 | −0.29194 | 27 | n.s. | n.s. | n.s. |
| P02749 | APOH | yes | 3.84464 | −0.28255 | 31 | 2.27566 | −0.29154 | 32 |
| P14151 | LYAM1 | yes | 2.66556 | −0.24187 | 10 | n.s. | n.s. | n.s. |
| P33151 | CADH5 | yes | 2.67279 | −0.23705 | 20 | 1.88633 | −0.22821 | 19 |
| Q96IY4 | CBPB2 | yes | n.s. | n.s. | n.s. | 1.94741 | −0.23490 | 20 |
| P13671 | CO6 | yes | 4.17551 | −0.23128 | 40 | 1.87498 | −0.20101 | 39 |
| P01857 | IGHG1 | yes | 2.02166 | −0.21750 | 38 | n.s. | n.s. | n.s. |
| P08603 | CFAH | yes | 7.83921 | −0.21367 | 94 | n.s. | n.s. | n.s. |
| P48740 | MASP1 | yes | 3.53649 | −0.20698 | 26 | n.s. | n.s. | n.s. |
| P07225 | PROS | yes | 4.35855 | −0.19474 | 29 | n.s. | n.s. | n.s. |
| P04217 | A1BG | yes | n.s. | n.s. | n.s. | 2.17355 | −0.19042 | 26 |
| P51884 | LUM | yes | 1.78747 | −0.18885 | 20 | n.s. | n.s. | n.s. |
| P01024 | CO3 | yes | 1.81376 | −0.14519 | 145 | n.s. | n.s. | n.s. |
| P07357 | CO8A | yes | 2.14317 | −0.12358 | 26 | n.s. | n.s. | n.s. |
| P00751 | CFAB | yes | 1.78967 | 0.14738 | 60 | n.s. | n.s. | n.s. |
| P09871 | C1S | yes | 2.14784 | 0.16084 | 34 | 4.15587 | 0.38069 | 41 |
| P06681 | CO2 | yes | 3.34179 | 0.19394 | 43 | n.s. | n.s. | n.s. |
| P22792 | CPN2 | yes | 3.43057 | 0.20781 | 27 | 3.89646 | 0.28186 | 29 |
| Q9NZP8 | C1RL | yes | 2.79373 | 0.21098 | 18 | n.s. | n.s. | n.s. |
| P08697 | A2AP | yes | 3.24390 | 0.21171 | 32 | n.s. | n.s. | n.s. |
| P36955 | PEDF | yes | n.s. | n.s. | n.s. | 2.28753 | 0.22102 | 21 |
| P11717 | MPRI | yes | n.s. | n.s. | n.s. | 1.97633 | 0.23118 | 19 |
| P00736 | C1R | yes | 4.27817 | 0.25902 | 33 | 3.17033 | 0.31239 | 35 |
| Q9UJJ9 | GNPTG | yes | 1.86275 | 0.25905 | 8 | 1.96651 | 0.31172 | 6 |
| Q14624 | ITIH4 | yes | 6.55387 | 0.27648 | 69 | 3.02181 | 0.28661 | 70 |
| Q08380 | LG3BP | yes | 2.74751 | 0.28765 | 28 | 2.61308 | 0.41218 | 31 |
| P08195 | 4F2 | yes | n.s. | n.s. | n.s. | 2.22032 | 0.29107 | 7 |
| P0C0L4 | CO4A | yes | 2.09240 | 0.29293 | 117 | n.s. | n.s. | n.s. |
| P19652 | A1AG2 | yes | 3.77280 | 0.31673 | 25 | 4.36650 | 0.33035 | 21 |
| P04004 | VTNC | yes | n.s. | n.s. | n.s. | 3.13936 | 0.32583 | 36 |
| P41222 | PTGDS | yes | 2.40867 | 0.33763 | 5 | n.s. | n.s. | n.s. |
| P08174 | DAF | yes | 2.10415 | 0.34032 | 6 | 1.89649 | 0.37660 | 5 |
| Q07954 | LRP1 | yes | n.s. | n.s. | n.s. | 2.56843 | 0.34108 | 50 |
| P02649 | APOE | yes | 2.07301 | 0.34376 | 17 | 6.19240 | 0.79243 | 21 |
| P16070 | CD44 | yes | 3.35073 | 0.34621 | 5 | n.s. | n.s. | n.s. |
| P02679 | FIBG | yes | n.s. | n.s. | n.s. | 3.08736 | 0.34909 | 55 |
| P15151 | PVR | yes | 2.22784 | 0.35489 | 8 | 8.04490 | 1.07755 | 8 |
| P01591 | IGJ | yes | 2.99050 | 0.35726 | 11 | n.s. | n.s. | n.s. |
| Q92820 | GGH | yes | 2.47904 | 0.39841 | 12 | n.s. | n.s. | n.s. |
| P14625 | ENPL | yes | 2.33464 | 0.40999 | 18 | 10.18847 | 0.89841 | 17 |
| Q8WZ75 | ROBO4 | yes | 2.18040 | 0.41293 | 13 | 4.40879 | 0.91956 | 10 |
| P02748 | CO9 | yes | 9.25697 | 0.41636 | 42 | n.s. | n.s. | n.s. |
| P01743 | HV146 | yes | 1.93680 | 0.41650 | 4 | 1.77375 | 0.55683 | 5 |
| P11047 | LAMC1 | yes | 1.84449 | 0.41884 | 19 | 6.32680 | 1.35593 | 15 |
| P13688 | CEAM1 | yes | 1.96616 | 0.41907 | 12 | 2.34897 | 0.45621 | 10 |
| O00391 | QSOX1 | yes | 6.30502 | 0.42759 | 27 | 2.87624 | 0.33374 | 26 |
| O00187 | MASP2 | no | n.s. | n.s. | n.s. | 2.87478 | 0.42770 | 15 |
| P55058 | PLTP | yes | 5.93225 | 0.43030 | 26 | 3.08348 | 1.34638 | 22 |
| P05155 | IC1 | yes | 11.45488 | 0.43699 | 36 | 4.95575 | 0.34019 | 35 |
| Q9UK55 | ZPI | yes | 7.01465 | 0.44968 | 23 | 8.68775 | 0.63152 | 21 |
| P19022 | CADH2 | yes | 2.02229 | 0.45222 | 15 | n.s. | n.s. | n.s. |
| Q6EMK4 | VASN | yes | 3.99504 | 0.45609 | 12 | n.s. | n.s. | n.s. |
| Q6UX71 | PXDC2 | yes | 2.01944 | 0.46597 | 9 | n.s. | n.s. | n.s. |
| Q9ULI3 | HEG1 | yes | n.s. | n.s. | n.s. | 2.12552 | 0.47089 | 12 |
| P01019 | ANGT | yes | 8.39295 | 0.47874 | 28 | 2.73631 | 0.37665 | 29 |
| P08637 | FCG3A | yes | 1.96554 | 0.49104 | 5 | 3.81553 | 0.72141 | 3 |
| P36980 | FHR2 | yes | 2.91122 | 0.49649 | 11 | n.s. | n.s. | n.s. |
| P01009 | A1AT | yes | 19.12260 | 0.49655 | 64 | 11.60368 | 0.72798 | 67 |
| P12111 | CO6A3 | yes | n.s. | n.s. | n.s. | 4.71125 | 0.50348 | 36 |
| Q03591 | FHR1 | yes | 3.64756 | 0.50506 | 19 | n.s. | n.s. | n.s. |
| Q7Z4W1 | DCXR | yes | 2.31083 | 0.52864 | 3 | n.s. | n.s. | n.s. |
| P27797 | CALR | yes | 1.93096 | 0.53667 | 5 | n.s. | n.s. | n.s. |
| P39060 | COIA1 | yes | n.s. | n.s. | n.s. | 2.02603 | 0.55146 | 11 |
| P02763 | A1AG1 | yes | 17.20090 | 0.55274 | 29 | 7.99656 | 0.64445 | 27 |
| P02671 | FIBA | yes | n.s. | n.s. | n.s. | 5.13772 | 0.57283 | 62 |
| P19320 | VCAM1 | yes | 8.70539 | 0.57388 | 35 | 11.00188 | 0.89252 | 31 |
| Q92520 | FAM3C | yes | 2.33976 | 0.57658 | 2 | n.s. | n.s. | n.s. |
| Q13822 | ENPP2 | yes | n.s. | n.s. | n.s. | 3.03884 | 0.58376 | 21 |
| P33908 | MA1A1 | yes | n.s. | n.s. | n.s. | 4.30950 | 0.58716 | 15 |
| P34810 | CD68 | yes | 1.72329 | 0.58926 | 1 | n.s. | n.s. | n.s. |
| Q9Y5C1 | ANGL3 | yes | 2.34424 | 0.59605 | 12 | 8.52487 | 1.46071 | 13 |
| Q16706 | MA2A1 | yes | n.s. | n.s. | n.s. | 3.60331 | 0.59907 | 14 |
| O95393 | BMP10 | yes | 1.95169 | 0.59984 | 3 | n.s. | n.s. | n.s. |
| P07333 | CSF1R | yes | 7.05523 | 0.60575 | 14 | n.s. | n.s. | n.s. |
| P01594 | KV133 | no | n.s. | n.s. | n.s. | 1.78874 | 0.61693 | 4 |
| Q8NBP7 | PCSK9 | yes | 2.10827 | 0.62056 | 10 | 5.08546 | 1.08238 | 8 |
| P04275 | VWF | yes | 6.22664 | 0.63104 | 113 | 4.15533 | 0.80714 | 113 |
| Q13201 | MMRN1 | yes | 7.27270 | 0.63527 | 29 | 6.13114 | 0.64867 | 26 |
| P35555 | FBN1 | yes | n.s. | n.s. | n.s. | 5.26994 | 0.64030 | 12 |
| P04066 | FUCO | yes | 2.21719 | 0.64061 | 4 | n.s. | n.s. | n.s. |
| Q12805 | FBLN3 | yes | 10.95891 | 0.65213 | 19 | 6.48808 | 0.66785 | 17 |
| P20774 | MIME | yes | n.s. | n.s. | n.s. | 1.79509 | 0.65679 | 9 |
| Q5JRA6 | TGO1 | yes | n.s. | n.s. | n.s. | 2.15836 | 0.66023 | 9 |
| P13796 | PLSL | no | 2.25744 | 0.66067 | 12 | 2.74873 | 1.56760 | 10 |
| Q9BXR6 | FHR5 | yes | 11.22872 | 0.66241 | 25 | 4.76568 | 0.68321 | 23 |
| Q15833 | STXB2 | yes | 2.11406 | 0.66493 | 2 | n.s. | n.s. | n.s. |
| P14314 | GLU2B | yes | 2.66135 | 0.66743 | 8 | n.s. | n.s. | n.s. |
| P07339 | CATD | yes | n.s. | n.s. | n.s. | 2.95390 | 0.66977 | 13 |
| P15169 | CBPN | yes | n.s. | n.s. | n.s. | 3.06806 | 0.67386 | 9 |
| P98172 | EFNB1 | yes | 3.09476 | 0.69092 | 2 | 4.26700 | 1.32357 | 3 |
| P05164 | PERM | yes | 3.24403 | 0.69448 | 20 | 6.59249 | 1.89462 | 20 |
| P08294 | SODE | yes | n.s. | n.s. | n.s. | 1.81109 | 0.70665 | 9 |
| P02776 | PLF4 | yes | 2.97951 | 0.71000 | 1 | n.s. | n.s. | n.s. |
| P13987 | CD59 | yes | 1.83607 | 0.71193 | 2 | 3.28436 | 1.30340 | 2 |
| Q5ZPR3 | CD276 | yes | 2.28981 | 0.72646 | 10 | n.s. | n.s. | n.s. |
| P07996 | TSP1 | yes | n.s. | n.s. | n.s. | 4.30152 | 0.73345 | 41 |
| P98095 | FBLN2 | yes | 2.19871 | 0.73618 | 5 | 1.95991 | 0.98118 | 1 |
| Q9Y251 | HPSE | yes | 1.81668 | 0.74633 | 6 | 2.04520 | 1.37433 | 2 |
| P00451 | FA8 | yes | 6.55954 | 0.74681 | 35 | 6.37689 | 1.24272 | 20 |
| Q08ET2 | SIG14 | yes | 1.74085 | 0.74724 | 7 | 2.30092 | 0.98539 | 9 |
| Q06278 | AOXA | yes | 1.89397 | 0.74943 | 17 | n.s. | n.s. | n.s. |
| Q9UNN8 | EPCR | yes | 1.85404 | 0.74981 | 7 | 2.11536 | 1.05361 | 5 |
| Q86TH1 | ATL2 | yes | 3.28358 | 0.76832 | 14 | 4.59807 | 1.04264 | 12 |
| Q13093 | PAFA | yes | 2.06889 | 0.77194 | 14 | n.s. | n.s. | n.s. |
| P05362 | ICAM1 | yes | 11.98438 | 0.78407 | 19 | 13.98151 | 1.27649 | 19 |
| Q06033 | ITIH3 | yes | 28.34559 | 0.79306 | 40 | 6.08913 | 0.68843 | 46 |
| P53634 | CATC | yes | 2.60671 | 0.79368 | 5 | 5.26862 | 1.14544 | 6 |
| Q14767 | LTBP2 | yes | 1.95809 | 0.79406 | 4 | 1.77388 | 1.24459 | 5 |
| Q9NPR2 | SEM4B | yes | n.s. | n.s. | n.s. | 4.04264 | 0.79450 | 12 |
| Q6UXG3 | CLM9 | yes | 2.48356 | 0.79741 | 1 | n.s. | n.s. | n.s. |
| P21810 | PGS1 | yes | n.s. | n.s. | n.s. | 2.79464 | 0.80063 | 5 |
| Q99650 | OSMR | yes | 6.75640 | 0.80077 | 16 | 5.59257 | 1.37147 | 13 |
| O14786 | NRP1 | yes | 7.33141 | 0.80166 | 20 | 7.28029 | 0.81945 | 18 |
| Q29960 | NELL1 | yes | 2.56837 | 0.82297 | 8 | n.s. | n.s. | n.s. |
| P08253 | HLAC | yes | n.s. | n.s. | n.s. | 1.88695 | 0.83117 | 14 |
| P50895 | MMP2 | yes | 1.88330 | 0.83295 | 4 | n.s. | n.s. | n.s. |
| P18850 | BCAM | yes | 1.78307 | 0.83459 | 3 | n.s. | n.s. | n.s. |
| P08571 | ATF6A | yes | 21.36105 | 0.84117 | 15 | 5.59383 | 0.57117 | 16 |
| Q96J42 | CD14 | yes | 1.95157 | 0.84750 | 3 | n.s. | n.s. | n.s. |
| P20908 | TXD15 | yes | 2.27201 | 0.85500 | 8 | n.s. | n.s. | n.s. |
| P19440 | CO5A1 | yes | n.s. | n.s. | n.s. | 2.45476 | 0.85700 | 6 |
| P78509 | GGT1 | yes | n.s. | n.s. | n.s. | 3.50111 | 0.86371 | 13 |
| P04438 | RELN | yes | 2.03730 | 0.87653 | 6 | n.s. | n.s. | n.s. |
| P01011 | AACT | yes | 23.21244 | 0.87704 | 52 | 14.83037 | 1.17358 | 52 |
| Q86UD1 | OAF | no | 9.50745 | 0.88302 | 8 | 3.73680 | 0.56235 | 5 |
| P23083 | HV102 | no | n.s. | n.s. | n.s. | 4.45111 | 0.88346 | 5 |
| Q12907 | LMAN2 | yes | 2.41435 | 0.88474 | 6 | n.s. | n.s. | n.s. |
| P48357 | OBRG | yes | 2.85685 | 0.88628 | 14 | 1.86827 | 0.83411 | 11 |
| Q16270 | LEPR | yes | 2.82047 | 0.88766 | 5 | 3.14515 | 1.10567 | 5 |
| P14543 | IBP7 | yes | n.s. | n.s. | n.s. | 2.95560 | 0.88805 | 23 |
| Q9Y2G1 | NID1 | yes | 1.80110 | 0.89738 | 1 | n.s. | n.s. | n.s. |
| P61626 | MYRF | yes | 2.67164 | 0.89784 | 4 | n.s. | n.s. | n.s. |
| Q9Y6R7 | LYSC | yes | 13.89568 | 0.90786 | 114 | 10.01542 | 1.26079 | 110 |
| O00451 | FCGBP | yes | 3.21938 | 0.90956 | 1 | 4.83859 | 2.30780 | 2 |
| O43505 | GFRA2 | yes | 2.61540 | 0.91243 | 5 | n.s. | n.s. | n.s. |
| O75976 | B4GA1 | yes | 2.26536 | 0.91465 | 6 | 4.11640 | 1.26819 | 4 |
| P02792 | CBPD | yes | 2.44719 | 0.91685 | 4 | n.s. | n.s. | n.s. |
| Q92673 | FRIL | yes | 2.49431 | 0.91958 | 3 | n.s. | n.s. | n.s. |
| Q6UVK1 | SORL | yes | 2.44412 | 0.92402 | 6 | n.s. | n.s. | n.s. |
| P28070 | CSPG4 | yes | n.s. | n.s. | n.s. | 1.89186 | 0.92766 | 2 |
| P05109 | S10A8 | yes | 2.25983 | 0.92767 | 3 | n.s. | n.s. | n.s. |
| Q8WWZ8 | OIT3 | yes | 4.61429 | 0.92902 | 12 | 4.28539 | 0.70409 | 9 |
| P07306 | ASGR1 | yes | 3.28801 | 0.93003 | 2 | 2.90357 | 1.42982 | 2 |
| Q9Y4L1 | HYOU1 | yes | 7.12715 | 0.93283 | 19 | 6.94524 | 0.84972 | 19 |
| P24821 | TENA | yes | 11.76862 | 0.94162 | 59 | 12.43858 | 1.54338 | 65 |
| P01833 | PIGR | yes | 12.09855 | 0.94459 | 33 | 3.86892 | 0.69013 | 29 |
| Q4LDE5 | SVEP1 | yes | 5.65240 | 0.94613 | 42 | 6.06358 | 1.06316 | 35 |
| O00300 | TR11B | yes | n.s. | n.s. | n.s. | 2.34616 | 0.95973 | 1 |
| P06331 | HV434 | yes | 2.38030 | 0.95999 | 2 | n.s. | n.s. | n.s. |
| Q9BRK5 | CAB45 | yes | n.s. | n.s. | n.s. | 1.84412 | 0.96299 | 4 |
| P27930 | IL1R2 | yes | 2.90251 | 0.96653 | 7 | 3.19242 | 1.21265 | 8 |
| P06737 | PYGL | yes | 2.26086 | 0.97076 | 14 | n.s. | n.s. | n.s. |
| Q9NPY3 | C1QR1 | yes | 2.99425 | 0.97817 | 12 | n.s. | n.s. | n.s. |
| P01824 | HV439 | yes | 3.82144 | 0.98068 | 4 | n.s. | n.s. | n.s. |
| P07942 | LAMB1 | yes | 2.83592 | 0.98096 | 17 | 4.70588 | 1.44631 | 18 |
| P08861 | CEL3B | yes | 2.26067 | 1.00020 | 5 | n.s. | n.s. | n.s. |
| P11021 | BIP | no | 2.33538 | 1.00040 | 13 | 3.07873 | 1.23926 | 13 |
| Q92626 | PXDN | yes | 3.31117 | 1.00521 | 9 | 4.39913 | 1.57583 | 10 |
| P02461 | CO3A1 | yes | 3.47437 | 1.00535 | 6 | n.s. | n.s. | n.s. |
| Q12841 | FSTL1 | yes | 3.95482 | 1.02864 | 7 | 6.26944 | 1.84547 | 6 |
| O95479 | G6PE | yes | n.s. | n.s. | n.s. | 5.12759 | 1.02333 | 13 |
| P48230 | T4S4 | yes | 2.60842 | 1.03073 | 1 | n.s. | n.s. | n.s. |
| Q13308 | PTK7 | yes | n.s. | n.s. | n.s. | 2.15758 | 1.04785 | 3 |
| P02750 | A2GL | yes | 20.10996 | 1.04941 | 24 | 8.75279 | 1.11714 | 24 |
| P01033 | TIMP1 | yes | 10.24891 | 1.05199 | 10 | 12.82187 | 1.91460 | 10 |
| Q5T5C0 | STXB5 | yes | 2.16351 | 1.05207 | 1 | n.s. | n.s. | n.s. |
| P10646 | TFPI1 | yes | n.s. | n.s. | n.s. | 2.90962 | 1.05276 | 4 |
| Q9Y5X9 | LIPE | yes | n.s. | n.s. | n.s. | 2.52241 | 1.06098 | 5 |
| P61916 | NPC2 | yes | 3.85486 | 1.06098 | 2 | 2.72719 | 1.69669 | 4 |
| P08581 | MET | yes | 2.65839 | 1.06412 | 7 | n.s. | n.s. | n.s. |
| O75594 | PGRP1 | yes | 4.55305 | 1.07944 | 5 | 7.43912 | 2.13348 | 4 |
| P02788 | TRFL | yes | 4.90960 | 1.09547 | 32 | 3.39243 | 1.49353 | 27 |
| Q03001 | DYST | no | 2.44655 | 1.09862 | 13 | 5.54377 | 2.02006 | 11 |
| P18428 | LBP | yes | 18.06551 | 1.11194 | 28 | 14.50218 | 1.80481 | 24 |
| Q9P2J2 | TUTLA | yes | n.s. | n.s. | n.s. | 2.18154 | 1.11467 | 3 |
| P00738 | HPT | yes | 8.50821 | 1.11557 | 52 | 6.98303 | 1.51806 | 51 |
| P35442 | TSP2 | yes | n.s. | n.s. | n.s. | 2.81164 | 1.11964 | 8 |
| P07307 | ASGR2 | yes | 15.59944 | 1.13462 | 8 | 9.79379 | 1.30585 | 8 |
| Q12866 | MERTK | yes | 3.56520 | 1.13501 | 8 | n.s. | n.s. | n.s. |
| P10645 | CMGA | yes | 2.91733 | 1.14212 | 14 | n.s. | n.s. | n.s. |
| P10153 | RNAS2 | yes | 4.71532 | 1.14295 | 5 | 4.45896 | 1.33039 | 5 |
| O75173 | ATS4 | yes | n.s. | n.s. | n.s. | 2.38950 | 1.15574 | 3 |
| P20160 | CAP7 | yes | 2.88239 | 1.15890 | 3 | 3.53067 | 1.72341 | 3 |
| P36222 | CH3L1 | yes | 2.32078 | 1.16093 | 15 | 4.52215 | 3.19040 | 17 |
| Q9Y6U3 | ADSV | yes | 3.34410 | 1.16820 | 3 | n.s. | n.s. | n.s. |
| P98173 | FAM3A | no | n.s. | n.s. | n.s. | 3.95444 | 1.16992 | 1 |
| P24387 | CRHBP | yes | n.s. | n.s. | n.s. | 1.95579 | 1.17591 | 2 |
| P20333 | TNR1B | yes | 5.84146 | 1.18465 | 2 | 5.24321 | 2.10336 | 3 |
| P04233 | HG2A | yes | 3.22684 | 1.19070 | 4 | 2.70230 | 1.68550 | 3 |
| Q9H3S1 | SEM4A | yes | n.s. | n.s. | n.s. | 2.33564 | 1.22482 | 2 |
| P18827 | SDC1 | yes | 5.67505 | 1.22587 | 2 | n.s. | n.s. | n.s. |
| Q16394 | EXT1 | yes | n.s. | n.s. | n.s | 2.20963 | 1.23404 | 6 |
| Q504Y2 | PKDCC | yes | 2.66762 | 1.23605 | 2 | n.s. | n.s. | n.s. |
| Q96HD1 | CREL1 | yes | 6.62576 | 1.24392 | 7 | n.s. | n.s. | n.s. |
| P10124 | SRGN | yes | n.s. | n.s. | n.s. | 3.25780 | 1.24444 | 1 |
| P08123 | CO1A2 | yes | n.s. | n.s. | n.s. | 5.20402 | 1.25903 | 4 |
| Q8IYS5 | OSCAR | yes | 4.47272 | 1.26514 | 8 | n.s. | n.s. | n.s. |
| Q6UX06 | OLFM4 | yes | 4.32069 | 1.27394 | 10 | 3.30363 | 1.43339 | 11 |
| Q15904 | VAS1 | yes | 4.73394 | 1.27963 | 4 | n.s. | n.s. | n.s. |
| Q8N6C8 | LIRA3 | yes | 5.50270 | 1.28561 | 15 | 15.98375 | 1.56223 | 15 |
| Q9UK05 | GDF2 | yes | n.s. | n.s. | n.s. | 2.85720 | 1.30635 | 2 |
| P18065 | IBP2 | no | 6.31672 | 1.31186 | 5 | 3.27487 | 1.53062 | 5 |
| O15123 | ANGP2 | yes | 3.41248 | 1.31223 | 7 | n.s. | n.s. | n.s. |
| P63104 | 1433Z | no | n.s. | n.s. | n.s. | 2.37127 | 1.32437 | 3 |
| Q99988 | GDF15 | yes | 4.07542 | 1.32756 | 3 | 2.97376 | 1.55999 | 3 |
| P12724 | ECP | yes | n.s. | n.s. | n.s. | 2.17843 | 1.33234 | 3 |
| P40199 | CEAM6 | yes | n.s. | n.s. | n.s. | 3.16738 | 1.37398 | 4 |
| P24043 | LAMA2 | yes | 5.08466 | 1.37859 | 16 | 9.80149 | 2.19251 | 15 |
| P12109 | CO6A1 | yes | n.s. | n.s. | n.s. | 2.81664 | 1.38638 | 21 |
| O76061 | STC2 | yes | n.s. | n.s. | n.s. | 1.98913 | 1.38943 | 2 |
| P41271 | NBL1 | yes | 5.99206 | 1.40398 | 2 | n.s. | n.s. | n.s. |
| P37173 | TGFR2 | yes | n.s. | n.s. | n.s. | 2.42655 | 1.41020 | 4 |
| P78324 | SHPS1 | yes | 5.44485 | 1.41690 | 6 | 4.51775 | 1.52289 | 6 |
| P07988 | PSPB | yes | 6.46152 | 1.42139 | 17 | n.s. | n.s. | n.s. |
| Q9BXX0 | EMIL2 | yes | 5.94118 | 1.42886 | 4 | n.s. | n.s. | n.s. |
| P35613 | BASI | yes | 4.89261 | 1.43155 | 2 | 2.05940 | 1.46589 | 1 |
| P12110 | CO6A2 | yes | n.s. | n.s. | n.s. | 2.90103 | 1.43369 | 3 |
| P08311 | CATG | yes | n.s. | n.s. | n.s. | 2.79993 | 1.44286 | 8 |
| Q9NQS3 | NECT3 | yes | 3.87901 | 1.45379 | 5 | n.s. | n.s. | n.s. |
| Q14314 | FGL2 | yes | 2.98099 | 1.47175 | 4 | 5.18110 | 2.25781 | 3 |
| Q9UBR2 | CATZ | yes | 7.39283 | 1.51039 | 7 | 1.99250 | 0.81572 | 4 |
| O95450 | ATS2 | yes | 2.24300 | 1.51531 | 6 | n.s. | n.s. | n.s. |
| Q9UHI8 | ATS1 | yes | 7.80388 | 1.51812 | 4 | n.s. | n.s. | n.s. |
| P16581 | LYAM2 | yes | 6.28835 | 1.53822 | 10 | 10.87612 | 1.93995 | 7 |
| Q9Y5Y7 | LYVE1 | yes | 11.98494 | 1.54350 | 8 | 6.97538 | 2.31568 | 7 |
| Q13443 | ADAM9 | yes | 4.74585 | 1.54724 | 2 | 2.21000 | 1.73878 | 2 |
| Q02487 | DSC2 | yes | 6.16132 | 1.56943 | 11 | 2.54150 | 1.70165 | 9 |
| Q01638 | ILRL1 | yes | 5.15837 | 1.61164 | 15 | 6.76720 | 2.60672 | 15 |
| Q6Q788 | APOA5 | no | n.s. | n.s. | n.s. | 2.15047 | 1.61827 | 8 |
| Q9BU40 | CRDL1 | yes | n.s. | n.s. | n.s. | 2.04544 | 1.62970 | 3 |
| Q07000 | HLAC | yes | n.s. | n.s. | n.s. | 3.72208 | 1.63794 | 9 |
| P14780 | MMP9 | yes | 7.07030 | 1.64485 | 16 | 6.28824 | 2.78388 | 11 |
| P01034 | CYTC | no | 4.75006 | 1.66041 | 5 | 1.81774 | 1.02492 | 6 |
| O95998 | I18BP | yes | 7.96544 | 1.66808 | 4 | 7.27421 | 1.89559 | 4 |
| Q9UKJ1 | PILRA | yes | 9.79282 | 1.66895 | 3 | 3.01008 | 1.16632 | 3 |
| P22897 | MRC1 | yes | 25.95184 | 1.67416 | 39 | 14.72995 | 1.44266 | 39 |
| P10451 | OSTP | yes | 5.86033 | 1.70067 | 8 | 8.45507 | 2.77160 | 2 |
| Q86VB7 | C163A | yes | 16.87486 | 1.72627 | 28 | 9.15459 | 1.38100 | 29 |
| P10253 | LYAG | yes | n.s. | n.s. | n.s. | 3.70770 | 1.74571 | 4 |
| P20061 | TCO1 | yes | n.s. | n.s. | n.s. | 3.44918 | 1.74930 | 6 |
| O43451 | MGA | yes | n.s. | n.s. | n.s. | 2.43692 | 1.75392 | 11 |
| Q96NZ9 | PRAP1 | no | n.s. | n.s. | n.s. | 3.41420 | 1.75584 | 2 |
| Q9Y287 | ITM2B | yes | 8.05416 | 1.76508 | 6 | 6.07105 | 2.01055 | 6 |
| Q08830 | FGL1 | no | 11.27936 | 1.76974 | 8 | 4.79382 | 1.98202 | 3 |
| P0DJI8 | SAA1 | no | 12.59947 | 1.77374 | 10 | 10.40360 | 2.98248 | 10 |
| Q15828 | CYTM | yes | n.s. | n.s. | n.s. | 3.26064 | 1.78565 | 2 |
| P15907 | SIAT1 | yes | 5.83542 | 1.82015 | 5 | n.s. | n.s. | n.s. |
| Q8WUA8 | TSK | yes | 8.03984 | 1.84549 | 8 | n.s. | n.s. | n.s. |
| P07858 | CATB | yes | n.s. | n.s. | n.s. | 5.90204 | 1.85876 | 12 |
| P42785 | PCP | yes | n.s. | n.s. | n.s. | 2.54688 | 1.86613 | 5 |
| P18510 | IL1RA | yes | 6.87476 | 1.87167 | 4 | 4.67441 | 2.92348 | 4 |
| Q02818 | NUCB1 | no | 8.55817 | 1.87732 | 12 | 6.42247 | 2.99106 | 8 |
| P61769 | B2MG | yes | n.s. | n.s. | n.s. | 3.63871 | 1.88157 | 1 |
| P00480 | OTC | no | n.s. | n.s. | n.s. | 3.35289 | 1.90336 | 4 |
| Q8NBJ4 | GOLM1 | yes | 9.90568 | 1.90706 | 11 | 5.32217 | 2.29165 | 7 |
| Q14118 | DAG1 | yes | 9.63426 | 1.93029 | 12 | 4.71907 | 1.77218 | 8 |
| Q9BYE9 | CDHR2 | yes | 7.25270 | 1.94119 | 28 | n.s. | n.s | n.s. |
| P13611 | CSPG2 | yes | n.s. | n.s. | n.s. | 4.85473 | 1.95988 | 11 |
| Q8N6Q3 | CD177 | yes | 11.29166 | 1.97986 | 3 | 5.50195 | 2.67147 | 2 |
| P11166 | GTR1 | yes | n.s. | n.s. | n.s. | 3.40269 | 1.98031 | 2 |
| P05186 | PPBT | yes | 15.05647 | 1.98826 | 7 | 4.13522 | 1.21779 | 6 |
| Q96FE7 | P3IP1 | yes | 9.51364 | 2.04260 | 3 | n.s. | n.s. | n.s. |
| P22894 | MMP8 | yes | 10.66964 | 2.05383 | 9 | 3.26299 | 1.60685 | 8 |
| P24158 | PRTN3 | yes | 9.59636 | 2.08745 | 9 | 5.40626 | 2.47814 | 8 |
| P08246 | ELNE | yes | 5.18490 | 2.16401 | 5 | 4.93041 | 1.79103 | 7 |
| P15291 | B4GT1 | yes | 9.90621 | 2.17112 | 7 | 2.45059 | 1.39832 | 7 |
| P02741 | CRP | no | 16.63801 | 2.17497 | 8 | 11.84687 | 3.62297 | 5 |
| P17900 | SAP3 | yes | 12.98102 | 2.26959 | 7 | n.s. | n.s. | n.s. |
| Q14508 | WFDC2 | yes | 8.05242 | 2.27279 | 4 | 7.41554 | 3.54897 | 2 |
| P48304 | REG1B | yes | 10.91310 | 2.28006 | 4 | n.s. | n.s. | n.s. |
| O95633 | FSTL3 | yes | 11.79504 | 2.36932 | 3 | 5.34808 | 2.58640 | 4 |
| P07998 | RNAS1 | yes | 11.83212 | 2.45625 | 3 | 3.41919 | 1.48639 | 4 |
| P80188 | NGAL | yes | 16.34685 | 2.46196 | 15 | 17.53393 | 2.61938 | 16 |
| P80511 | S10AC | no | n.s. | n.s. | n.s. | 6.62195 | 2.51935 | 1 |
| P0DJI9 | SAA2 | no | 15.65403 | 2.60907 | 11 | 8.92113 | 4.10664 | 12 |
| P01130 | LDLR | yes | n.s. | n.s. | n.s. | 7.75301 | 2.66205 | 3 |
| P00367 | DHE3 | no | n.s. | n.s. | n.s. | 6.38645 | 2.69080 | 16 |
| P26022 | PTX3 | yes | n.s. | n.s. | n.s. | 5.49726 | 2.74354 | 7 |
| P05451 | REG1A | yes | 17.60192 | 3.20631 | 6 | 10.36391 | 3.44469 | 6 |
| Q9Y279 | VSIG4 | yes | 32.32804 | 4.21055 | 10 | 12.10262 | 4.19468 | 9 |

[0363] Table 11 lists all identified peptides suitable for detection of plasma proteins with significantly different concentration in SIRS or sepsis patients (Table 7) (in both cohorts studied with significantly different concentration).

### Receiver-Operating-Characteristic (ROC) Curve Analyses

[0364] To determine the diagnostic quality of the proteins detected with significantly altered concentration in the discovery cohort dataset, receiver operating characteristic (ROC) curve analyses were performed using the proteomic ally determined LFQ values, comparing the true-positive rate with the false-positive rate. The ROC curve of the clinically determined PCT value was taken as the baseline reference (FIG. 6). The PCT value in the 264-patient discovery cohort dataset showed an AUC of only 0.63. In contrast, the CRP values detected in proteomics showed a significantly higher AUC of 0.81. The values for CRP were somewhat better when the values measured in the clinic were used; an AUC of 0.85 revealed a significantly improved sensitivity and specificity compared to the PCT value.

[0365] Thirteen of the proteins detected in the proteomic data set of the discovery cohort with significantly different plasma levels in the SIRS vs. the sepsis group showed an improved AUC compared with CRP (FIG. 6): serotransferrin (TRFE, gene name:TF), AUC=0.85; insulin-like growth factor-binding protein complex acid labile subunit (ALS, gene name: IGFALS), AUC=0.85; cholinesterase (CHLE, gene name BCHE), AUC=0.86; macrophage mannose receptor 1, MMR (MRC1, gene name MRC1), AUC=0.86; afamin (AFAM, gene name AFM), AUC=0.86; inter-alpha-trypsin inhibitor heavy chain H3 (ITIH3, gene name ITIH3), AUC=0.86; alpha-2-HS-glycoprotein (FETUA, gene name AHSG), AUC=0.87; soluble V-set and immunoglobulin domain-containing protein 4 (sVSIG4, gene nme VSIG4), AUC=0.87; calistatin (KAIN, gene name SERPINA4), AUC=0.88; N-acetylmuramoyl-L-alanine amidase (PGRP2, gene name PGLYRP2), AUC=0.88; phosphatidylinositol-glycan-specific phospholipase D (PHLD, gene name GPLD1), AUC=0.90; Inter-alpha-trypsin inhibitor heavy chain H1, (ITIH1, gene name ITHI1), AUC=0.91; inter-alpha-trypsin inhibitor heavy chain H2, (ITIH2, gene name ITIH2), AUC=0.93. However, of these 13 plasma proteins, TRFE, ITIH3, PGRP2, ITIH1, and ITIH2 showed only slightly different abundance levels in the SIRS vs. the sepsis group (FC≤2). In the validation cohort, ALS (0.82), CHLE (0.83), AFAM (0.82), ITIH3 (0.78), PHLD (0.81), and ITIH1 (AUC=0.84) had a slightly lower AUC than CRP. In contrast, TRFE (AUC=0.90), MRC1 (AUC=0.91), FETUA (AUC=0.91), SVSIG4 (AUC=0.88), KAIN (AUC=0.91), and ITIH2 (AUC=0.86) also showed higher sensitivity and higher specificity than CRP in the validation cohort.

### Linear Discrimination Analysis (LDA)

[0366] Using a linear discrimination analysis (LDA, backward elimination approach) with 24 plasma proteins (with fold-change exclusion criterion FC>2) that showed the highest AUC values in the Discovery cohort, it was then searched for a classifier that in combination yields an even better AUC than the individual markers (FIG. 7). The AUC with all 24 marker candidates was 0.971, a combination of 4 markers (PHLD, IBP3, A2GL, and sVSIG4) showed an AUC of 0.959, and the combination of two plasma proteins, PHLD and sVSIG4, showed an AUC of 0.940.

[0367] The same approach was subsequently performed with plasma proteins without considering the fold-change criterion ≥2 between the SIRS and sepsis groups (FIG. 8). The 24 proteins considered in the beginning achieved an AUC of 0.973. After reduction to four markers (ITIH2, PGRP2, sVSIG4, and CD14) an AUC of 0.966 could still be observed. Reduction to 2 markers (sVSIG4 and ITIH2) possessed an AUC=0.952, slightly improved over LDA with FC≥2 as an exclusion criterion.

[0368] The AUC of the combinations is superior to the use of CRP as the sole marker in both cases. Unexpectedly, sVSIG4 is included in the combinations with two markers in both approaches as a marker for the diagnosis of sepsis. Hence, sVSIG4 alone, or in combination with one (in the example with ITIH2 and PHLD) or more other plasma proteins is suitable for sepsis diagnosis and shows better AUC compared to the use of CRP and PCT.

### Microbiological Comparison

[0369] Statistical analysis of plasma proteins detected in patient samples with microbiologically positive results (59 patients) compared with plasma samples from patients without microbiologically positive results (205 patients, diagnosed with SIRS or sepsis; microbiological findings negative or not tested) in the Discovery cohort showed that 104 significantly differentially abundant plasma proteins were detectable in the data set, 34 of which had an FC≥2, differing in abundance between the two groups (FIG. 9A). 100 of the significantly differentially detected proteins in the comparison of microbiological culture positive/negative (MiBi pos/neg) also showed significantly different abundance in the comparison sepsis to SIRS (FIG. 9B). All 39 plasma proteins that showed decreased levels in the plasma of culture-positive patients compared with MiBi pos/neg were also detected with decreased levels in sepsis patients compared with SIRS patients (FIG. 9D). Of the 65 plasma proteins detectable at elevated levels in the MiBi pos/neg comparison, 61 were also elevated in plasma from sepsis patients (FIG. 9C). The results of the MiBi-pos/neg and SIRS/sepsis comparisons show a strong correlation, indicating that part of the results of the differently detectable plasma protein levels of the sepsis patients was actually caused by the systemic infection underlying the sepsis.

[0370] Among the plasma proteins that showed significantly higher plasma levels in the MiBi-positive patient samples, soluble V-set immunoglobulin domain-containing protein 4 (sVSIG4) was the protein that possessed the most pronounced positive fold change in this comparison (Table 8). This indicates that sVSIG4 is a suitable marker in the blood of patients for the diagnosis of systemic infections such as in critically ill patients with suspected sepsis.

TABLE 8
Protein accession numbers (protein ID), entry name, p-value and
fold changes (FC) of significant differentially abundant proteins
in patients with positive microbiological cultures and critically ill
patients with negative microbiological results in the discovery cohort.
The protein IDs and entry names are retrieved from the UniProt database
with release number 2016_04. The entry names can alternatively have
the suffix “_HUMAN”; with and without the suffix the same
proteins are meant.

| Protein IDs | Entry name | −Log p-value | (log2) FC |
|---|---|---|---|
| P20023 | CR2 | 3.08137153 | −1.55758017 |
| P54289 | CA2D1 | 3.12552862 | −1.26334002 |
| Q12884 | SEPR | 2.34704837 | −1.19589657 |
| P27487 | DPP4 | 6.06088343 | −1.03259778 |
| Q16620 | NTRK2 | 3.00599068 | −0.97421245 |
| Q15166 | PON3 | 3.20248881 | −0.92370361 |
| P11597 | CETP | 3.7738715 | −0.83761395 |
| P12821 | ACE | 2.62878649 | −0.78018986 |
| P05154 | IPSP | 5.50140947 | −0.76697514 |
| P02765 | FETUA | 8.39837843 | −0.72460471 |
| P80108 | PHLD | 6.44183325 | −0.70373614 |
| Q96KN2 | CNDP1 | 3.35749662 | −0.68547451 |
| P29622 | KAIN | 7.27840681 | −0.67802198 |
| Q9NPH3 | IL1AP | 3.8148049 | −0.67775297 |
| P43652 | AFAM | 6.24263504 | −0.60666018 |
| Q01459 | DIAC | 2.8713128 | −0.59588869 |
| Q04756 | HGFA | 5.67731673 | −0.57603459 |
| P06276 | CHLE | 4.88015496 | −0.5669809 |
| Q96PD5 | PGRP2 | 6.70022277 | −0.5569823 |
| P49908 | SEPP1 | 5.57151637 | −0.53465789 |
| Q76LX8 | ATS13 | 3.31935801 | −0.50109036 |
| P02787 | TRFE | 8.03833789 | −0.49821518 |
| O95445 | APOM | 4.32890443 | −0.48065214 |
| P27169 | PON1 | 4.18947629 | −0.46799523 |
| Q9HDC9 | APMAP | 3.04928629 | −0.44306081 |
| Q9UHG3 | PCYOX | 3.10326861 | −0.44062759 |
| P19823 | ITIH2 | 5.25045691 | −0.44002637 |
| P04180 | LCAT | 4.21965451 | −0.41851358 |
| P03952 | KLKB1 | 5.5486052 | −0.41541664 |
| P00748 | FA12 | 4.0157504 | −0.40981195 |
| P04070 | PROC | 3.98458335 | −0.40952776 |
| P05546 | HEP2 | 4.98254282 | −0.40011724 |
| O75882 | ATRN | 7.18587701 | −0.39795864 |
| Q9UGM5 | FETUB | 2.64638295 | −0.38100001 |
| P19827 | ITIH1 | 4.91348387 | −0.34536326 |
| O00533 | NCHL1 | 2.4620556 | −0.34233753 |
| P43251 | BTD | 3.59969811 | −0.30583442 |
| P01023 | A2MG | 2.74234988 | −0.24776139 |
| P05160 | F13B | 2.29771299 | −0.24015869 |
| P22792 | CPN2 | 2.30398461 | 0.19703667 |
| P00736 | C1R | 2.65821575 | 0.23619101 |
| P05155 | IC1 | 2.87306219 | 0.24978271 |
| P02748 | CO9 | 2.89014555 | 0.26532963 |
| O00391 | QSOX1 | 2.48362594 | 0.30376831 |
| P01009 | A1AT | 5.36818486 | 0.31705474 |
| P55058 | PLTP | 2.73005358 | 0.33381537 |
| P02763 | A1AG1 | 5.72549874 | 0.38314685 |
| P07333 | CSF1R | 2.3253627 | 0.39012844 |
| P19320 | VCAM1 | 3.19195476 | 0.39948027 |
| P02649 | APOE | 2.32270634 | 0.44033249 |
| P01011 | AACT | 4.17762073 | 0.44881445 |
| Q92820 | GGH | 2.31699889 | 0.45772388 |
| P05362 | ICAM1 | 3.35578132 | 0.47948711 |
| Q9BXR6 | FHR5 | 4.363787 | 0.48449098 |
| Q12805 | FBLN3 | 4.48591108 | 0.49007551 |
| P14625 | ENPL | 2.34461248 | 0.49162674 |
| P08571 | CD14 | 5.43558744 | 0.51505944 |
| Q03591 | FHR1 | 2.88487225 | 0.52813794 |
| P02750 | A2GL | 4.029204 | 0.56002402 |
| P24821 | TENA | 3.20414518 | 0.56576105 |
| Q06033 | ITIH3 | 9.3696118 | 0.57226284 |
| P18428 | LBP | 3.48128599 | 0.57324723 |
| P04275 | VWF | 3.99681955 | 0.59328509 |
| P11047 | LAMC1 | 2.52417405 | 0.60551887 |
| P01833 | PIGR | 4.51838493 | 0.67920961 |
| Q4LDE5 | SVEP1 | 2.65935867 | 0.7416346 |
| Q9Y6R7 | FCGBP | 6.80097966 | 0.76078455 |
| P07307 | ASGR2 | 5.20626719 | 0.78157479 |
| Q6ZMJ2 | SCAR5 | 2.3178046 | 0.79934157 |
| P22897 | MRC1 | 4.20953887 | 0.82102808 |
| Q6UY14 | ATL4 | 2.52189546 | 0.85821879 |
| Q6GPI1 | CTRB2; CTRB1 | 3.56464265 | 0.89123633 |
| Q86VB7 | C163A | 3.52973563 | 0.92508253 |
| Q92626 | PXDN | 2.32180507 | 0.97703565 |
| Q08830 | FGL1 | 2.83913732 | 1.0122009 |
| Q13616 | CUL1 | 2.62937086 | 1.01842893 |
| Q8NBJ4 | GOLM1 | 2.34166677 | 1.03785103 |
| P07988 | PSPB | 2.72142863 | 1.05202117 |
| Q9UKJ1 | PILRA | 2.99553178 | 1.05576562 |
| Q9Y5Y7 | LYVE1 | 4.59415609 | 1.12516049 |
| Q8N6Q3 | CD177 | 2.91743126 | 1.14982574 |
| Q9Y287 | ITM2B | 2.67773266 | 1.15434336 |
| P41271 | NBL1 | 3.19919066 | 1.18768187 |
| P05186 | PPBT | 3.97790169 | 1.20102224 |
| P15291 | B4GT1 | 2.44505857 | 1.21233645 |
| P17900 | SAP3 | 2.92682836 | 1.23464415 |
| 095998 | 118BP | 3.32410112 | 1.24340534 |
| PODJI8 | SAA1 | 4.66809734 | 1.27333635 |
| Q96HD1 | CREL1 | 4.98182273 | 1.27780229 |
| Q14118 | DAG1 | 3.19699188 | 1.27810841 |
| P22894 | MMP8 | 3.16218551 | 1.28475604 |
| Q14508 | WFDC2 | 2.35561119 | 1.37792124 |
| Q02818 | NUCB1 | 3.45178582 | 1.37840438 |
| Q9BYE9 | CDHR2 | 2.93015846 | 1.41221548 |
| P08861 | CEL3B | 3.19539348 | 1.46569493 |
| P02741 | CRP | 5.28935851 | 1.46695224 |
| Q96FE7 | P3IP1 | 3.67998074 | 1.4743947 |
| P07998 | RNAS1 | 3.49258377 | 1.54616251 |
| P10451 | OSTP | 3.70797353 | 1.58316367 |
| P48304 | REG1B | 3.99281268 | 1.60971291 |
| P80188 | NGAL | 4.95817658 | 1.61642568 |
| PODJI9 | SAA2 | 4.58758699 | 1.67493973 |
| P05451 | REG1A | 4.4104115 | 1.9091026 |
| Q9Y279 | VSIG4 | 8.87904988 | 2.80756706 |

Comparison of Sepsis Caused by Gram-Positive and Gram-Negative Bacteria and of Sepsis with Abdominal and Respiratory Origin

[0371] sVSIG4 is equally elevated in systemic infections (microbiologically verified sepsis) caused by gram-positive (n=49) and gram-negative (n=23) bacteria in plasma (FC=1.002) (FIG. 10A) and is thus useful for detecting systemic infections caused by either group of bacteria. However, there were differences when comparing different sites of origin of infection of the original site of inflammation in patient plasma from the Discovery cohort. For example, when comparing “focus abdominal” (n=50) versus “focus respiratory system” (n=77), there was a significant difference in plasma levels of 30 proteins, 13 of which had an FC≥2 (FIG. 10B). Whereas particularly metalloproteinase-9 (MMP9), interleukin-1 receptors antagonist protein (IL1RN), soluble V-set and immunoglobulin domain-containing protein 4 (sVSIG4), metalloproteinase 8 (MMP8), Chitinase-3-like protein 1 (CHI3L1), Interleukin receptor-like 1 (IL1RA), CD177 antigen (CD177), Neutrophil gelatinase-associated lipocalin (NGAL), Lactotransferrin (TRFL), Interleukin-18-binding protein (IL18BP), metalloproteinase inhibitor 1 (TIMP1), and Cell growth regulator with EF hand domain protein 1 (CGRE1) showed a significantly increased plasma level (FC≥2) at abdominal focus, Neuronal growth regulator 1 (NEGR1) was increased in the data set (FC≥2) at respiratory focus (Table 9). Therefore, sVSIG4 is a suitable biomarker in plasma for the detection of systemic infections and sepsis with abdominal focus, but high sVSIG4 levels are also detectable in plasma samples of patients with systemic infections or sepsis with respiratory focus. sVSIG4 is thus also suitable as a biomarker for diagnostic purposes of systemic infections or sepsis with respiratory focus.

TABLE 9
Protein accession numbers (protein ID), entry name, p-value and
fold changes (FC) of significant differentially abundant proteins
in patient plasma with abdominal focus or focus in the respiratory
system of the discovery cohort. Negative FC indicates higher abundance
in patients with abdominal focus. The protein IDs and entry names are
retrieved from the UniProt database with release number 2016_04.
The entry names can alternatively have the suffix “_HUMAN”;
with and without the suffix the same proteins are meant.

| Protein ID | Entry name | −Log (pvalue) | (log2) FC |
|---|---|---|---|
| P14780 | MMP9 | 7.512205654 | −2.82460037 |
| P18510 | IL1RA | 4.909896103 | −2.78520465 |
| Q9Y279 | VSIG4 | 4.941267379 | −2.53294196 |
| P22894 | MMP8 | 5.013845754 | −2.48376327 |
| P36222 | CH3L1 | 4.943745264 | −2.41468359 |
| Q01638 | ILRL1 | 5.095015795 | −2.3319485 |
| Q8N6Q3 | CD177 | 3.939610912 | −1.99312876 |
| P80188 | NGAL | 5.093130034 | −1.90039267 |
| P02788 | TRFL | 4.529346784 | −1.68405437 |
| 095998 | 118BP | 2.864002746 | −1.65571646 |
| P01033 | TIMP1 | 9.767724806 | −1.46938083 |
| Q99674 | CGRE1 | 2.8599008 | −1.1166551 |
| P00451 | FA8 | 3.439292347 | −0.83886837 |
| P18428 | LBP | 4.855640214 | −0.81086941 |
| P22897 | MRC1 | 3.348461951 | −0.78439345 |
| Q9Y6R7 | FCGBP | 2.857496983 | −0.68810898 |
| P55058 | PLTP | 4.626845124 | −0.67781356 |
| Q9UK55 | ZPI | 3.515840958 | −0.50491835 |
| P01011 | AACT | 3.162276496 | −0.43595465 |
| Q06033 | ITIH3 | 3.019430156 | −0.34699502 |
| P07225 | PROS | 3.423984395 | 0.29631643 |
| P19823 | ITIH2 | 2.874333118 | 0.38155042 |
| P19827 | ITIH1 | 4.298794097 | 0.40014553 |
| P05160 | F13B | 3.313673111 | 0.40502489 |
| Q9UHG3 | PCYOX | 3.624438242 | 0.65116467 |
| P80108 | PHLD | 3.655545207 | 0.65915758 |
| P35542 | SAA4 | 3.339607166 | 0.80727516 |
| P05154 | IPSP | 3.334887841 | 0.81164102 |
| P02654 | APOC1 | 3.242626938 | 0.86247809 |
| Q7Z3B1 | NEGR1 | 3.21064905 | 1.9347828 |

### Prognosis of Mortality

[0372] Further analysis of the discovery cohort dataset showed that plasma proteins were detected in patient samples already at the beginning of diagnosis (on day 1 or day 2) that correlated with an increased risk of mortality from sepsis. Statistical analysis of proteomic quantitative data from patients who died of sepsis compared with data from all other critically ill but surviving patients revealed a total of 179 significantly altered plasma proteins, 125 with a FC between the two groups of ≥2 (FIG. 11A). In contrast, in the smaller, 96-patient Validation cohort, only 4 plasma proteins were significantly differentially abundant (detected when comparing the groups of sepsis decedents vs. survivors), three of which (soluble V-Set and immunoglobulin domain-containing protein 4, sVSIG4; tenascin, TENA; kininogen-1, KNG1) were also already identified as significantly altered in the Discovery cohort (FIG. 11B). Table 10 lists significant differentially abundant proteins in patients who died of sepsis and critically ill patients who survived (discovery cohort and validation cohort).

TABLE 10
Protein accession numbers (protein ID), entry name, p-value, fold changes (FC), and
peptide numbers of significant differentially abundant proteins in patients who died
of sepsis and critically ill patients who survived identified in the discovery cohort and
in the validation cohort. The protein IDs and entry names are retrieved from the UniProt
database with release number 2016_04. The entry names can alternatively have the
suffix “_HUMAN”; with and without the suffix the same proteins are meant.

| | | Discovery cohort | | Validation cohort | | |
|---|---|---|---|---|---|---|
| Protein | Entry | | (log2) | | | (log2) |
| ID | name | Log(p-value) | FC | Peptides | Log(p-value) | FC |
| Q14623 | IHH | 2.75009255 | −1.22793992 | 4 | n.s. | n.s. |
| P02751 | FINC | 4.91551789 | −1.21008938 | 122 | n.s. | n.s. |
| Q15166 | PON3 | 3.29263755 | −1.03903157 | 9 | n.s. | n.s. |
| P11597 | CETP | 4.61095434 | −1.0364968 | 20 | n.s. | n.s. |
| Q8NI99 | ANGL6 | 2.58403424 | −1.02525044 | 5 | n.s. | n.s. |
| P35858 | ALS | 7.33942868 | −0.9951301 | 24 | n.s. | n.s. |
| Q86U17 | SPA11 | 3.35492013 | −0.98991567 | 5 | n.s. | n.s. |
| P35579 | MYH9 | 4.32298818 | −0.93019323 | 23 | n.s. | n.s. |
| Q76LX8 | ATS13 | 8.69260053 | −0.90362652 | 22 | n.s. | n.s. |
| P09172 | DOPO | 2.69374945 | −0.87277774 | 21 | n.s. | n.s. |
| Q96KN2 | CNDP1 | 4.35885187 | −0.87189195 | 23 | n.s. | n.s. |
| P29622 | KAIN | 9.55110161 | −0.82740154 | 27 | n.s. | n.s. |
| P06276 | CHLE | 8.18336877 | −0.81540846 | 24 | n.s. | n.s. |
| P80108 | PHLD | 7.38747309 | −0.8056155 | 31 | n.s. | n.s. |
| P17936 | IBP3 | 3.20297716 | −0.72007939 | 10 | n.s. | n.s. |
| Q9UGM5 | FETUB | 7.52848881 | −0.71937977 | 15 | n.s. | n.s. |
| Q9NPH3 | IL1AP | 3.3551727 | −0.68969538 | 18 | n.s. | n.s. |
| P43652 | AFAM | 6.94433621 | −0.68780317 | 32 | n.s. | n.s. |
| P02765 | FETUA | 6.6100095 | −0.67709399 | 21 | n.s. | n.s. |
| P05154 | IPSP | 3.42416887 | −0.64776231 | 18 | n.s. | n.s. |
| P02751 | FINC | 4.86877064 | −0.6438581 | 127 | n.s. | n.s. |
| P04180 | LCAT | 7.92029676 | −0.63452812 | 16 | n.s. | n.s. |
| P02751 | FINC | 3.57920121 | −0.63406886 | 126 | n.s. | n.s. |
| Q96PD5 | PGRP2 | 7.46326766 | −0.63271291 | 24 | n.s. | n.s. |
| P27169 | PON1 | 6.14271149 | −0.60990953 | 23 | n.s. | n.s. |
| P19823 | ITIH2 | 8.22376193 | −0.60126865 | 34 | n.s. | n.s. |
| Q04756 | HGFA | 4.62885728 | −0.55663892 | 17 | n.s. | n.s. |
| P02766 | TTHY | 3.1052683 | −0.54295455 | 11 | n.s. | n.s. |
| P08709 | FA7 | 2.73931127 | −0.53911339 | 11 | n.s. | n.s. |
| P05546 | HEP2 | 7.72302378 | −0.53885674 | 33 | n.s. | n.s. |
| O95445 | APOM | 4.45679548 | −0.53031005 | 13 | n.s. | n.s. |
| P19827 | ITIH1 | 9.17338167 | −0.52397387 | 45 | n.s. | n.s. |
| P55056 | APOC4 | 2.45733335 | −0.51495354 | 6 | n.s. | n.s. |
| P55290 | CAD13 | 2.01680047 | −0.50544904 | 15 | n.s. | n.s. |
| P04070 | PROC | 5.2469028 | −0.49946507 | 15 | n.s. | n.s. |
| P03952 | KLKB1 | 6.4297617 | −0.48471807 | 38 | n.s. | n.s. |
| Q9HDC9 | APMAP | 3.07069391 | −0.47981277 | 13 | n.s. | n.s. |
| P02647 | APOA1 | 2.08560823 | −0.4664324 | 17 | n.s. | n.s. |
| P00747 | PLMN | 7.53558393 | −0.46384894 | 52 | n.s. | n.s. |
| P05452 | TETN | 3.40620389 | −0.45658416 | 10 | n.s. | n.s. |
| P49908 | SEPP1 | 3.67126232 | −0.45608873 | 12 | n.s. | n.s. |
| P05160 | F13B | 5.83726652 | −0.44312265 | 31 | n.s. | n.s. |
| P04196 | HRG | 4.28649201 | −0.41554185 | 29 | n.s. | n.s. |
| P00739 | HPTR | 2.70748894 | −0.40882986 | 34 | n.s. | n.s. |
| O75636 | FCN3 | 2.63130452 | −0.40268162 | 15 | n.s. | n.s. |
| P02787 | TRFE | 3.71243361 | −0.35717211 | 95 | n.s. | n.s. |
| P00748 | FA12 | 2.57368797 | −0.34326586 | 27 | n.s. | n.s. |
| P02790 | HEMO | 4.25643834 | −0.3428616 | 43 | n.s. | n.s. |
| P02743 | SAMP | 2.26862339 | −0.32843156 | 16 | n.s. | n.s. |
| P07358 | CO8B | 4.64519174 | −0.32653007 | 31 | n.s. | n.s. |
| P43251 | BTD | 3.4778152 | −0.32542919 | 17 | n.s. | n.s. |
| P02749 | APOH | 3.18916741 | −0.32404277 | 31 | n.s. | n.s. |
| P13671 | CO6 | 4.75454476 | −0.3200028 | 40 | n.s. | n.s. |
| O75882 | ATRN | 3.89379928 | −0.30778968 | 50 | n.s. | n.s. |
| P26927 | HGFL | 2.4266216 | −0.28362935 | 28 | n.s. | n.s. |
| P12259 | FA5 | 2.96944846 | −0.27780085 | 70 | n.s. | n.s. |
| P01042 | KNG1 | 4.32412728 | −0.25896531 | 38 | 3.80627996 | −2.33227374 |
| P07225 | PROS | 4.41665401 | −0.25521628 | 29 | n.s. | n.s. |
| P10909 | CLUS | 2.71484883 | −0.24050487 | 31 | n.s. | n.s. |
| P08603 | CFAH | 5.84472925 | −0.23896085 | 94 | n.s. | n.s. |
| P01008 | ANT3 | 3.27319786 | −0.22934429 | 49 | n.s. | n.s. |
| Q16610 | ECM1 | 2.07481733 | −0.22645308 | 25 | n.s. | n.s. |
| P07357 | CO8A | 3.31781978 | −0.20685927 | 26 | n.s. | n.s. |
| P00734 | THRB | 2.42620898 | −0.19821656 | 50 | n.s. | n.s. |
| P04003 | C4BPA | 2.06752377 | −0.17394013 | 48 | n.s. | n.s. |
| P05155 | IC1 | 2.26070556 | 0.23566718 | 36 | n.s. | n.s. |
| P02763 | A1AG1 | 2.57980572 | 0.2615262 | 29 | n.s. | n.s. |
| P01009 | A1AT | 3.23545409 | 0.26283845 | 64 | n.s. | n.s. |
| O00391 | QSOX1 | 2.27741204 | 0.30986962 | 27 | n.s. | n.s. |
| Q06033 | ITIH3 | 3.42824145 | 0.36611588 | 40 | n.s. | n.s. |
| Q9UJJ9 | GNPTG | 2.25622543 | 0.38413875 | 8 | n.s. | n.s. |
| P02750 | A2GL | 2.21345957 | 0.42897561 | 24 | n.s. | n.s. |
| P01011 | AACT | 3.4431659 | 0.43649899 | 52 | n.s. | n.s. |
| P55058 | PLTP | 4.30099889 | 0.45898558 | 26 | n.s. | n.s. |
| P08174 | DAF | 2.42567198 | 0.4835161 | 6 | n.s. | n.s. |
| Q13201 | MMRN1 | 3.8446122 | 0.52168493 | 29 | n.s. | n.s. |
| Q12805 | FBLN3 | 4.55966799 | 0.52862632 | 19 | n.s. | n.s. |
| P19320 | VCAM1 | 4.72006696 | 0.54606802 | 35 | n.s. | n.s. |
| P05362 | ICAM1 | 4.11635772 | 0.57973929 | 19 | n.s. | n.s. |
| P68871 | HBB | 2.35069877 | 0.58168575 | 12 | n.s. | n.s. |
| P08571 | CD14 | 6.14404913 | 0.59042272 | 15 | n.s. | n.s. |
| Q13822 | ENPP2 | 2.43418852 | 0.59562562 | 24 | n.s. | n.s. |
| Q15848 | ADIPO | 2.13105737 | 0.59952962 | 4 | n.s. | n.s. |
| P04275 | VWF | 3.76496674 | 0.62008591 | 113 | n.s. | n.s. |
| P01833 | PIGR | 3.36251133 | 0.62698675 | 33 | n.s. | n.s. |
| P07307 | ASGR2 | 3.92262965 | 0.72584464 | 8 | n.s. | n.s. |
| Q9H7U1 | CCSE2 | 2.41738284 | 0.74112212 | 2 | n.s. | n.s. |
| Q9NP78 | ABCB9 | 2.13012217 | 0.76736652 | 1 | n.s. | n.s. |
| P11216 | PYGB | 2.78595616 | 0.7719977 | 7 | n.s. | n.s. |
| Q9Y6R7 | FCGBP | 6.54131491 | 0.77494308 | 114 | n.s. | n.s. |
| P07333 | CSF1R | 7.21925357 | 0.79524523 | 14 | n.s. | n.s. |
| Q4LDE5 | SVEP1 | 2.49760485 | 0.79730754 | 42 | n.s. | n.s. |
| Q01518 | CAP1 | 2.22871092 | 0.81266148 | 5 | n.s. | n.s. |
| P24821 | TENA | 5.47445981 | 0.83634118 | 59 | 3.79750258 | 1.15280480 |
| Q08830 | FGL1 | 2.28279479 | 0.96656894 | 8 | n.s. | n.s. |
| P18827 | SDC1 | 2.42098329 | 0.96791777 | 2 | n.s. | n.s. |
| P01033 | TIMP1 | 5.46284691 | 0.97815833 | 10 | n.s. | n.s. |
| P48357 | LEPR | 2.18444028 | 0.9942007 | 14 | n.s. | n.s. |
| O95393 | BMP10 | 3.19045568 | 1.01689158 | 3 | n.s. | n.s. |
| Q96HD1 | CREL1 | 2.92968044 | 1.0287374 | 7 | n.s. | n.s. |
| P02792 | FRIL | 2.03833259 | 1.04322237 | 4 | n.s. | n.s. |
| P53634 | CATC | 2.62817316 | 1.04728613 | 5 | n.s. | n.s. |
| P61626 | LYSC | 2.23475341 | 1.06531505 | 4 | n.s. | n.s. |
| P08648 | ITA5 | 2.63588105 | 1.06757974 | 5 | n.s. | n.s. |
| Q15063 | POSTN | 2.40882631 | 1.09820697 | 20 | n.s. | n.s. |
| Q12841 | FSTL1 | 2.86696374 | 1.1063594 | 7 | n.s. | n.s. |
| Q9UHI8 | ATS1 | 2.837539 | 1.13900535 | 4 | n.s. | n.s. |
| P50895 | BCAM | 2.12492591 | 1.16126645 | 4 | n.s. | n.s. |
| Q92626 | PXDN | 2.81842135 | 1.16274138 | 9 | n.s. | n.s. |
| Q6UX06 | OLFM4 | 2.40502576 | 1.16419793 | 10 | n.s. | n.s. |
| P16581 | LYAM2 | 2.44863746 | 1.1698984 | 10 | n.s. | n.s. |
| P02461 | CO3A1 | 2.97304197 | 1.17170634 | 6 | n.s. | n.s. |
| P61916 | NPC2 | 3.03754394 | 1.17995506 | 2 | n.s. | n.s. |
| Q9Y287 | ITM2B | 2.35256703 | 1.18367957 | 6 | n.s. | n.s. |
| P01824 | HV439 | 3.49889677 | 1.19026569 | 4 | n.s. | n.s. |
| P22897 | MRC1 | 7.63470692 | 1.20579442 | 39 | n.s. | n.s. |
| P04746 | AMYP | 2.1992487 | 1.21535845 | 7 | n.s. | n.s. |
| Q08ET2 | SIG14 | 2.58125269 | 1.21924185 | 7 | n.s. | n.s. |
| O75976 | CBPD | 2.41195721 | 1.22483024 | 6 | n.s. | n.s. |
| P48230 | T4S4 | 2.35063594 | 1.22764472 | 1 | n.s. | n.s. |
| Q15904 | VAS1 | 2.78093626 | 1.23382225 | 4 | n.s. | n.s. |
| P63261 | ACTB | 2.18867843 | 1.24745685 | 12 | n.s. | n.s. |
| P12318 | FCG2A | 2.19128689 | 1.25342436 | 5 | n.s. | n.s. |
| P02788 | TRFL | 4.0208494 | 1.27744359 | 32 | n.s. | n.s. |
| P13796 | PLSL | 4.56955514 | 1.28573772 | 12 | n.s. | n.s. |
| Q8N6Q3 | CD177 | 3.2209174 | 1.28942313 | 3 | n.s. | n.s. |
| P02741 | CRP | 3.6686961 | 1.29764162 | 8 | n.s. | n.s. |
| Q16270 | IBP7 | 3.50274438 | 1.31878109 | 5 | n.s. | n.s. |
| P18065 | IBP2 | 4.03200458 | 1.32073883 | 5 | n.s. | n.s. |
| P20333 | TNR1B | 4.70666059 | 1.32356664 | 2 | n.s. | n.s. |
| P07988 | PSPB | 3.51518355 | 1.323627 | 17 | n.s. | n.s. |
| P35613 | BASI | 2.72565952 | 1.33657063 | 2 | n.s. | n.s. |
| P16284 | PECA1 | 2.57548699 | 1.33752794 | 6 | n.s. | n.s. |
| P22894 | MMP8 | 3.07380734 | 1.34840683 | 9 | n.s. | n.s. |
| Q02487 | DSC2 | 2.89625002 | 1.34905451 | 11 | n.s. | n.s. |
| P05186 | PPBT | 4.41785497 | 1.35794757 | 7 | n.s. | n.s. |
| Q8NBJ4 | GOLM1 | 3.47676142 | 1.37008564 | 11 | n.s. | n.s. |
| Q9UBR2 | CATZ | 3.94918595 | 1.37232991 | 7 | n.s. | n.s. |
| Q9Y5Y7 | LYVE1 | 5.87535694 | 1.38477406 | 8 | n.s. | n.s. |
| P37173 | TGFR2 | 2.32290507 | 1.40782312 | 4 | n.s. | n.s. |
| Q12907 | LMAN2 | 3.45460813 | 1.41497189 | 6 | n.s. | n.s. |
| P24043 | LAMA2 | 3.3513455 | 1.44112756 | 16 | n.s. | n.s. |
| P14780 | MMP9 | 3.55216517 | 1.44614447 | 16 | n.s. | n.s. |
| Q14118 | DAG1 | 3.52828922 | 1.45049075 | 12 | n.s. | n.s. |
| P15291 | B4GT1 | 2.84792128 | 1.45155582 | 7 | n.s. | n.s. |
| P13611 | CSPG2 | 2.54440028 | 1.50209026 | 15 | n.s. | n.s. |
| Q9BYE9 | CDHR2 | 3.08546336 | 1.53471998 | 28 | n.s. | n.s. |
| Q9BXX0 | EMIL2 | 4.16911948 | 1.54849993 | 4 | n.s. | n.s. |
| P04438 | HV270 | 3.50549052 | 1.55292515 | 6 | n.s. | n.s. |
| P10451 | OSTP | 3.12095055 | 1.5571218 | 8 | n.s. | n.s. |
| P78324 | SHPS1 | 4.01942869 | 1.5577667 | 6 | n.s. | n.s. |
| P48304 | REG1B | 3.40045026 | 1.56146932 | 4 | n.s. | n.s. |
| P40199 | CEAM6 | 2.85616904 | 1.56485437 | 8 | n.s. | n.s. |
| Q9UKJ1 | PILRA | 5.28245143 | 1.57886007 | 3 | n.s. | n.s. |
| P04233 | HG2A | 3.42800442 | 1.58906794 | 4 | n.s. | n.s. |
| Q86VB7 | C163A | 8.41315108 | 1.61353141 | 28 | n.s. | n.s. |
| Q14314 | FGL2 | 2.3298371 | 1.65406515 | 4 | n.s. | n.s. |
| O95633 | FSTL3 | 3.62466462 | 1.65765523 | 3 | n.s. | n.s. |
| Q06828 | FMOD | 3.19131517 | 1.66901188 | 2 | n.s. | n.s. |
| P15907 | SIAT1 | 3.38819447 | 1.72222858 | 5 | n.s. | n.s. |
| P24158 | PRTN3 | 4.26712302 | 1.72912265 | 9 | n.s. | n.s. |
| O75023 | LIRB5 | 3.38543795 | 1.74950522 | 7 | n.s. | n.s. |
| O75594 | PGRP1 | 7.00488387 | 1.75491107 | 5 | n.s. | n.s. |
| Q01638 | ILRL1 | 3.84833514 | 1.7810369 | 15 | n.s. | n.s. |
| P80188 | NGAL | 5.1893638 | 1.78977183 | 15 | n.s. | n.s. |
| Q14767 | LTBP2 | 6.0346016 | 1.96640871 | 4 | n.s. | n.s. |
| P18510 | IL1RA | 4.61609587 | 1.9711799 | 4 | n.s. | n.s. |
| P10645 | CMGA | 4.96841668 | 1.99850054 | 14 | n.s. | n.s. |
| Q96FE7 | P3IP1 | 5.656079 | 2.02447772 | 3 | n.s. | n.s. |
| P07998 | RNAS1 | 5.17237657 | 2.08542297 | 3 | n.s. | n.s. |
| P17900 | SAP3 | 6.88676605 | 2.09765396 | 7 | n.s. | n.s. |
| P08246 | ELNE | 3.20231883 | 2.12209068 | 5 | n.s. | n.s. |
| Q9Y6U3 | ADSV | 6.44086105 | 2.13723126 | 3 | n.s. | n.s. |
| Q13443 | ADAM9 | 5.56537088 | 2.17278805 | 2 | n.s. | n.s. |
| P05451 | REG1A | 4.98736174 | 2.19621618 | 6 | n.s. | n.s. |
| Q02818 | NUCB1 | 7.9321741 | 2.32918641 | 12 | n.s. | n.s. |
| Q14508 | WFDC2 | 5.39001622 | 2.40279253 | 4 | n.s. | n.s. |
| Q9Y279 | VSIG4 | 10.6608539 | 3.29922395 | 10 | 3.91530032 | 3.02987284 |

[0373] In receiver-operating characteristic analyses of the Discovery cohort, sVSIG4 showed the highest AUC of all proteins identified in the data set that prognostically indicate sepsis with an increased risk of mortality (FIG. 12). The AUC of sVSIG4 was 0.77, whereas the clinical data of CRP and PCT in this prognosis showed significantly worse AUC values of 0.66 and 0.56, respectively. The AUC of sVSIG4 for prognostic purposes to identify patients at increased risk of mortality was not only best in terms of the proteomic data set of detected plasma proteins but also performed better than the available clinical parameters, better than the SOFA-score, APACHE ii- and SAPS-score on the day of sample collection (AUC_{SOFA}=0.73, AUC_{APACHEii}=0.71, AUC_{SAPS}=0.71), which are measures of increase in organ dysfunction (FIG. 13).

### Verification and Quantitative Analysis by ELISA

[0374] Plasma levels of sVSIG4 were subsequently quantified by ELISA (enzyme-linked immunosorbent assay, quantitative) for verification. Using an appropriate antibody pair against the extracellular domain of VSIG4 (and thus binding to sVSIG4), plasma samples from the Discovery and Validation cohorts were assayed for sVSIG4. As a result, plasma samples from sepsis patients in the Discovery and Validation cohorts showed significantly elevated levels compared with the SIRS group: Concentration sVSIG4 (mean±SD) in plasma from sepsis patients was 83493±82876 pg/ml and 84391±83982 pg/ml in the Discovery and Validation cohorts, and 12572±40392 and 11532±41672 in plasma samples from SIRS patients in the Discovery and Validation cohorts, respectively (1-way ANOVA Dunn's multiple comparison test p<0.0001, FIG. 14A). With respect to the severity of the underlying disease, there was a significantly increased sVSIG4 level in plasma samples from patients with severe sepsis and septic shock compared to SIRS and SIRS+Organ dysfunction patients. Patients with septic shock showed the highest sVSIG4 plasma levels, but not significantly elevated compared to samples from patients with severe sepsis (FIG. 14B). Significantly elevated levels of plasma-associated sVSIG4 (p<0.0001) were also detected for the patient groups with microbiologically verified positive results (compared to culture-negative patients, FIG. 14C) and for patients with elevated SOFA-score (≥7, compared to patients with SOFA≤6, FIG. 14E) in the discovery cohort. A slight but significant increase (p<0.05) in plasma sVSIG4 concentration was detected in patients with sepsis with abdominal focus vs. focus in the respiratory tract, consistent with the proteomic data (FIG. 14D). Plasma samples from patients (day 1 or 2 after diagnosis) who died of sepsis during the course of the disease showed significantly increased early sVSIG4 plasma concentrations (FIG. 14F) compared with surviving patients (SIRS and sepsis): sepsis (mean+SD)=99617±76947 pg/mL and SIRS (mean+SD)=40020±71920 pg/mL).

[0375] Comparison of sVSIG4 levels determined by ELISA with CRP and PCT levels measured in the clinic (discovery and verification cohorts, n=360, FIG. 15) showed that sVSIG4 levels in plasma of all patients correlate slightly with CRP levels, i.e. elevated CRP levels also result in elevated sVSIG4 levels in plasma of patients (FIG. 15A). When samples from the SIRS group are examined alone, this correlation is lost (FIG. 15B), with sVSIG4 levels ranging from 1000-10,000 pg/ml. In the patient group with sepsis, sVSIG4 levels are found to be high in all patients (in the range 10,000-100,000 pg/ml, FIG. 15C) and a correlation to increasing CRP levels of patients on the same examination day is not apparent. Sepsis patients with low CRP values mostly already show high sVSIG4 values. The correlations with PCT are similar. While no correlation of plasma VSIG4 with PCT can be shown in the examinations of all patients or the patients of the SIRS group, it is evident, similarly to the comparison with CRP, that sVSIG4 appears in high concentrations on the day of examination in all patient groups (with 3 exceptions below the detection level), independent of the measured PCT value (FIGS. 15D and 15E). Particularly in the sepsis group, the sVSIG4 concentration is strongly elevated independent of the PCT value (FIG. 15F).

[0376] In summary, the verification experiments by ELISA indicate that by using quantification methods to determine the sVSIG level in patient blood samples (e.g. in plasma) alone, or in combination with other biomarkers, it is possible to diagnostically differentiate patients with severe sepsis or septic shock from patients with SIRS or SIRS+organ dysfunction. Furthermore, high sVSIG4 levels already indicate an increased mortality risk of the patient at an early stage of the disease, so that this patient group can be identified and thus could get an individualized, more intensive monitoring in order to be able to therapeutically intervene at an early stage. sVSIG4 levels are particularly high in plasma in patients with microbiologically positive confirmations of a systemic infection and with high SOFA-score values.

[0377] The plasma concentration of sVSIG4 shows only a slight correlation to CRP (high CRP values correlate with high sVSIG4 values), but especially in the sepsis group, high sVSIG4 levels are already detectable when CRP values were still quite low on day 1 or 2 of diagnosis. sVSIG4 is therefore a marker for systemic infections, sepsis and septic shock that is independent of CRP as well as PCT.

[0378] As a predictor of sepsis with very good performance, sVSIG4 alone (FIG. 16A+B) and sVSIG4 in combination with other biomarkers can be considered, e.g. PHLD (which also shows good performance alone, FIG. 16C, mass spectrometry data), but also a combination with CRP (clinical data FIG. 16D), which is already used in the clinic, is possible. The combination of sVSIG4 and PHLD (FIG. 16E) has a sensitivity and specificity of 88.4% at a cut-off value of 0.262 (linear combination of the two markers) with an AUC of 0.94. Based on PHLD values only, quantitative determinations by ELISA may lead to even more accurate values and improved specificity/sensitivity. The combination of sVSIG4 and CRP performs slightly worse compared with the combination sVSIG4/PHLD but has a sensitivity and specificity of 86.7% at a cut-off value of −0.203 and an AUC of 0.916 (FIG. 16F, ELISA data sVSIG4). The combination with myeloblastin (PRTN3) is also possible (FIG. 16G) with a sensitivity and specificity of 87.1% at a cut-off value of −0.126 (linear combination of the two markers) with an AUC of 0.917.

Verification of Increased sVSIG4 Abundance in Plasma of Sepsis Patients (Sepsis-3 Definition)

[0379] In a cohort of sepsis patients (classified according to Sepsis-3 Definition) plasma levels of sVSIG4 were quantified by ELISA (enzyme-linked immunosorbent assay, quantitative) in EDTA-plasma from sepsis patients, patients with septic shock and a group of healthy volunteers (15 samples per group), using an appropriate antibody pair against the extracellular domain of VSIG4 (and thus binding to sVSIG4). Compared to the sepsis group, patients in the septic shock group showed higher CRP levels (201±91.7 mg/ml and 275.4±138.3 mg/ml, (mean±SD) respectively, FIG. 17A), significantly higher PCT levels (4.4±7.7 ng/ml and 48.2±119.4 ng/ml, (mean±SD) respectively, p=0.040 two-tailed t-test, FIG. 17B) and a significantly increased SOFA-score (2.5±1.8 and 11.3±3.2, (mean±SD) respectively, p<0.0001, two-tailed t-test, FIG. 17C). In 14 out of 15 healthy volunteer samples, sVSIG4 in plasma was below the detection limit of the assay. Patients diagnosed with sepsis showed significantly elevated sVSIG4 levels in plasma, with a mean concentration of 31889±91603 pg/ml (mean+SD), while two patients had sVSIG4 level below the detection level. Patients with septic shock showed further increased sVSIG4 levels in plasma samples with 90124±91684 pg/ml (mean+SD), significantly increased compared to the sepsis group (p<0.0007, two-tailed t-test). The data indicate that sVSIG4 levels in sepsis patients (defined according to Sepsis-3 Definition) rise substantially with increased morbidity.

### Clinical Study

[0380] The findings of the present invention can be further analyzed with the following clinical study which is described exemplarily.

[0381] 1. Screening (n=2000)

[0382] ICU admission:

[0383] Assessment for eligibility on 10 ICUs during a 15-month study recruitment period: Patients with severe cardiovascular diseases, patients diagnosed with sepsis or suspected sepsis, patients with septic shock

2. Assignment (n=900) (Expected to be Excluded (n=1100))

[0384] Patient recruitment:
[0385] (i) Assessment of basic characteristics (age, gender, SOFA-score, APACHE-ii-score, SAPS-ii-score, CRP, PCT, hypotension treatment, lactate, organ dysfucntion, infection focus)
[0386] (ii) Sampling day 1 (max. 24 h after ICU admission), EDTA blood sample for plasma preparation, storage at −80° ° C.

### 3. Follow-Up

[0387] Follow-up visits:
[0388] (i) Assessment of basic characteristics (age, gender, SOFA-score, APACHE-ii-score, SAPS-ii-score, CRP, PCT, hypotension treatment, lactate, organ dysfunction, infection focus, microbiological result)
[0389] (ii) Patient sampling at day 1 and every other day (if applicable): EDTA blood sample for plasma preparation, storage at −80° ° C.

[0390] Cases: Infection group

[0391] (Urinary, respiratory, abdominal, wound, post-surgical)

[0392] Sepsis, n=300

[0393] Septic shock, n=300

[0394] Controls: Non-infection group, n=300

[0395] Severe cardiovascular diseases

### 4. Analysis

[0396] Cases to be analyzed (n=900)

[0397] Marker_M1 plasma concentration

[0398] Controls to be analyzed (n=300)

[0399] Marker_M1 plasma concentration

### Differentially Abundant Proteins in SIRS and Sepsis Patients

[0400] The following Table 11 lists protein names and identified peptide sequences of differentially abundant proteins in SIRS and sepsis patients. In a preferred embodiment, the level of sVSIG4 can be combined with the level of any one or more of the identified proteins for the method as described herein.

TABLE 11
Protein accession numbers (Protein ID), gene names, protein names and
identified peptide sequences of significantly differentially abundant proteins in the discovery
and validation cohort of SIRS and sepsis patients. Sequences were retrieved from the
UniProt Database with release number 2016_04 on May 11, 2016.

| Protein ID | Gene name | Protein name | Peptide sequence |
|---|---|---|---|
| Q13443 | ADAM9 | Disintegrin and | GLLHLENASYGIEPLQNSSHFEHIIYR |
| | | metalloproteinase | GYVEGVHNSSIALSDCFGLR |
| | | domain-containing protein | |
| | | 9 | |
| Q76LX8 | ADAMTS13 | A disintegrin and | ACVGADLQAEMCNTQACEK |
| | | metalloproteinase with | |
| | | thrombospondin motifs 13 | |
| | | | AGAQQPAVALETCNPQPCPAR |
| | | | AHGEDDGEEILLDTQCQGLPRPEPQEA |
| | | | CSLEPCPPR |
| | | | CQVCGGDNSTCSPR |
| | | | DTCLGPQAQAPVPADFCQHLPK |
| | | | EHLDMCQALSCHTDPLDQSSCSR |
| | | | EYVTFLTVTPNLTSVYIANHR |
| | | | FDLELPDGNR |
| | | | GPGQADCAVAIGR |
| | | | IAIHALATNMGAGTEGANASYILIR |
| | | | IWGPLQEDADIQVYR |
| | | | LLPGPQENSVQSSACGR |
| | | | LLVPLLDGTECGVEK |
| | | | LPAPEPCVGMSCPPGWGHLDATSA |
| | | | GEK |
| | | | MSISPNTTYPSLLEDGR |
| | | | PLGEVVTLR |
| | | | PQPGSAGHPPDAQPGLYYSANEQCR |
| | | | QAWVWAAVR |
| | | | SLVELTPIAAVHGR |
| | | | TTAFHGQQVLYWESESSQAEMEFSEG |
| | | | FLK |
| | | | VLESSLNCSAGDMLLLWGR |
| | | | VPVQEELCGLASK |
| | | | WVNYSCLDQAR |
| | | | YGEEYGNLTRPDITFTYFQPK |
| | | | YGSQLAPETFYR |
| | | | YVLTNLNIGAELLR |
| Q86TH1 | ADAMTSL2 | ADAMTS-like protein 2 | CGICQGDGSSCTHVTGNYR |
| | | | DFTLNETVNSIFAQGAPR |
| | | | GNAHLGYSLVTHIPAGAR |
| | | | GVCVSGKCEPIGCDGVLFSTHTLDK |
| | | | LFGHPGLDMELGPSQGQETNEVCEQA |
| | | | GGGACEGPPR |
| | | | MLSPGFDSSVYSDLCEAAEAVRPEER |
| | | | NCPAHWLAQDWER |
| | | | NFNIAGTVVK |
| | | | NPACGPQWEMSEWSECTAK |
| | | | PMDVYETGIEYIVAQGPTNQGLNVMVW |
| | | | NQNGK |
| | | | PQPIYYGFSESAESQGLDGAGLMGFVP |
| | | | HNGSLYGQASSER |
| | | | SADVLALADEAGYYFFNGNYK |
| | | | SPSITFEYTLLQPPHESRPQPIYYGFSE |
| | | | SAESQGLDGAGL |
| | | | MGFVPHNGSLYGQASSER |
| | | | VANSSSEAPFPNVSTSLLTSAGNR |
| | | | YDGVEVDDSYCDALTRPEPVHEFC |
| | | | AGR |
| P43652 | AFM | Afamin | AESPEVCFNEESPK |
| | | | AIPVTQYLK |
| | | | CCKAESPEVCFNEESPK |
| | | | CMADKTLPECSKLPNNVLQEK |
| | | | DADPDTFFAK |
| | | | DIENFNSTQK |
| | | | DLLRNCCNTENPPGCYR |
| | | | ELISLVEDVSSNYDGCCEGDVVQCIR |
| | | | ESLLNHFLYEVAR |
| | | | FIEDNIEYITIIAFAQYVQEATFEEMEK |
| | | | FLVNLVK |
| | | | FTDSENVCQER |
| | | | FTFEYSR |
| | | | HELTDEELQSLFTNFANVVDK |
| | | | HFQNLGK |
| | | | HPDLSIPELLR |
| | | | IAPQLSTEELVSLGEK |
| | | | ICAMEGLPQK |
| | | | IVQIYKDLLR |
| | | | KSDVGFLPPFPTLDPEEK |
| | | | LCFFYNK |
| | | | LKHELTDEELQSLFTNFANVVDK |
| | | | LPNNVLQEK |
| | | | MVTAFTTCCTLSEEFACVDNLADLVFG |
| | | | ELCGVNENR |
| | | | NPFVFAPTLLTVAVHFEEVAK |
| | | | RHPDLSIPELLR |
| | | | RNPFVFAPTLLTVAVHFEEVAK |
| | | | SCCEEQNK |
| | | | SDVGFLPPFPTLDPEEK |
| | | | TINPAVDHCCK |
| | | | TYVPPPFSQDLFTFHADMCQSQNEE |
| | | | LQR |
| | | | VMNHICSKQDSISSK |
| | | | VVHFIYIAILSQK |
| | | | YAEDKFNETTEK |
| P01019 | AGT | Angiotensinogen | AAMVGMLANFLGFR |
| | | | ADSQAQLLLSTVVGVFTAPGLHLK |
| | | | ALQDQLVLVAAK |
| | | | ALQDQLVLVAAKLDTEDK |
| | | | ALQDQLVLVAAKLDTEDKLR |
| | | | ANAGKPKDPTFIPAPIQAK |
| | | | DPTFIPAPIQAK |
| | | | EPTESTQQLNKPEVLEVTLNR |
| | | | EPTESTQQLNKPEVLEVTLNRPFLFAVY |
| | | | DQSATALHFLGR |
| | | | FMQAVTGWK |
| | | | IDRFMQAVTGWK |
| | | | IYGMHSELWGVVHGATVLSPTAVFGTL |
| | | | ASLYLGALDHTADR |
| | | | LDAHKVLSALQAVQGLLVAQGR |
| | | | LQAILGVPWK |
| | | | LQAILGVPWKDK |
| | | | LQAILGVPWKDKNCTSR |
| | | | PFLFAVYDQSATALHFLGR |
| | | | PKDPTFIPAPIQAK |
| | | | QPFVQGLALYTPVVLPR |
| | | | SLDFTELDVAAEK |
| | | | SLDFTELDVAAEKIDR |
| | | | SLDFTELDVAAEKIDRFMQAVTGWK |
| | | | TGCSLMGASVDSTLAFNTYVHFQGK |
| | | | TIHLTMPQLVLQGSYDLQDLLAQAELPA |
| | | | ILHTELNLQK |
| | | | VEGLTFQQNSLNWMK |
| | | | VGEVLNSIFFELEADER |
| | | | VGEVLNSIFFELEADEREPTESTQQLNK |
| | | | PEVLEVTLNR |
| | | | VLSALQAVQGLLVAQGR |
| | | | VYIHPFHLVIHNESTCEQLAK |
| P02765 | AHSG | Alpha-2-HS-glycoprotein | AALAAFNAQNNGSNFQLEEISR |
| | | | AQLVPLPPSTYVEFTVSGTDCVAK |
| | | | AQLVPLPPSTYVEFTVSGTDCVAKEAT |
| | | | EAAK |
| | | | CNLLAEK |
| | | | CNLLAEKQYGFCK |
| | | | EATEAAKCNLLAEKQYGFCK |
| | | | EHAVEGDCDFQLLK |
| | | | EHAVEGDCDFQLLKLDGK |
| | | | FSVVYAK |
| | | | HTFMGVVSLGSPSGEVSHPR |
| | | | HTLNQIDEVK |
| | | | HTLNQIDEVKVWPQQPSGELFEIEIDTL |
| | | | ETTCHVLDPTPVAR |
| | | | KVCQDCPLLAPLNDTR |
| | | | KVCQDCPLLAPLNDTRVVHAAK |
| | | | QLKEHAVEGDCDFQLLK |
| | | | QLKEHAVEGDCDFQLLKLDGK |
| | | | QPNCDDPETEEAALVAIDYINQNLPW |
| | | | GYK |
| | | | TVVQPSVGAAAGPVVPPCPGR |
| | | | VCQDCPLLAPLNDTR |
| | | | VCQDCPLLAPLNDTRVVHAAK |
| | | | VVHAAKAALAAFNAQNNGSNFQLEE |
| | | | ISR |
| | | | VWPQQPSGELFEIEIDTLETTCHVLDPT |
| | | | PVAR |
| P05186 | ALPL | Alkaline phosphatase, | AIGQAGSLTSSEDTLTVVTADHSHVFTF |
| | | tissue-nonspecific | GGYTPR |
| | | isozyme | ANEGTVGVSAATER |
| | | | CNTTQGNEVTSILR |
| | | | ENVSMVDYAHNNYQAQSAVPLR |
| | | | LDGLDLVDTWK |
| | | | NNVTDPSLSEMVVVAIQILR |
| | | | TELLTLDPHNVDYLLGLFEPGDMQYE |
| | | | LNR |
| | | | VVGGERENVSMVDYAHNNYQAQSAV |
| | | | PLR |
| Q9Y5C1 | ANGPTL3 | Angiopoietin-related | DLLQTVEDQYK |
| | | protein 3 | DLVFSTWDHK |
| | | | FAMLDDVK |
| | | | HDGIPAECTTIYNR |
| | | | IDGSQNFNETWENYK |
| | | | IDQDNSSFDSLSPEPK |
| | | | IELEDWK |
| | | | ILANGLLQLGHGLK |
| | | | LDGEFWLGLEK |
| | | | LNIFDQSFYDLSLQTSEIKEEEK |
| | | | MLIHPTDSESFE |
| | | | PSNSQVFHVYCDVISGSPWTLIQHR |
| | | | YLEEQLTNLIQNQPETPEHPEVTSLK |
| | | | ATPEAANASELAALR |
| | | | FTGAVCWSGPASTR |
| | | | GDHELLVLLEDWGGR |
| | | | LCPGGAGGQQQVLPPPPLVPVVPVR |
| | | | YLEEQLTNLIQNQPETPEHPEVTSLK |
| | | | YQDGVYWAEFR |
| Q8NI99 | ANGPTL6 | Angiopoietin-related | ATPEAANASELAALR |
| | | protein 6 | FTGAVCWSGPASTR |
| | | | GDHELLVLLEDWGGR |
| | | | LCPGGAGGQQQVLPPPPLVPVVPVR |
| | | | VLNASAEAQR |
| | | | YQDGVYWAEFR |
| Q9H6X2 | ANTXR1 | Anthrax toxin receptor 1 | DFNETQLAR |
| | | | DHVFPVNDGFQALQGIIHSILK |
| | | | INDSVTLNEKPFSVEDTYLLCPAPILK |
| | | | LDALWVLLR |
| | | | NLNNNMRR |
| | | | SGSVLHHWNEIYYFVEQLAHK |
| Q16853 | AOC3 | Membrane primary amine | DAFCVFEQNQGLPLR |
| | | oxidase | EALAIVFFGR |
| | | | ELPQASGLLHHCCFYK |
| | | | GDQDAGACEVNPLACLPQAAACAPDL |
| | | | PAFSHGGFSHN |
| | | | GVDCPYLATYVDWHFLLESQAPK |
| | | | IQMLSFAGEPLPQNSSMAR |
| | | | KEEEPSSSSVFNQNDPWAPTVDFSDFI |
| | | | NNETIAGK |
| | | | LGPGLVDAAQAR |
| | | | LLEMEEQAAFLVGSATPR |
| | | | LVYEISLQEALAIYGGNSPAAMTTR |
| | | | QPQPNVSELVVGPLPHPSYMR |
| | | | RPVLFQEYLDIDQMIFNR |
| | | | VDLDVAGLENWVWAEDMVFVPMAVP |
| | | | WSPEHQLQR |
| | | | YLYLASNHSNK |
| P04114 | APOB | Apolipoprotein B-100 | AALTELSLGSAYQAMILGVDSK |
| | | | AASGTTGTYQEWK |
| | | | ADSVVDLLSYNVQGSGETTYDHK |
| | | | ADYVETVLDSTCSSTVQFLEYELNVLG |
| | | | THK |
| | | | AEPLAFTFSHDYK |
| | | | AHLDIAGSLEGHLR |
| | | | ALVDTLK |
| | | | ALVDTLKFVTQAEGAK |
| | | | ALVEQGFTVPEIK |
| | | | ALYWVNGQVPDGVSK |
| | | | AQIPILR |
| | | | AQNLYQELLTQEGQASFQGLK |
| | | | AQNLYQELLTQEGQASFQGLKDNVFD |
| | | | GLVR |
| | | | ARYHMKADSVVDLLSYNVQGSGETTY |
| | | | DHK |
| | | | ASGSLPYTQTLQDHLNSLK |
| | | | ATFQTPDFIVPLTDLR |
| | | | ATGVLYDYVNK |
| | | | ATGVLYDYVNKYHWEHTGLTLR |
| | | | ATLELSPWQMSALVQVHASQPSSFHD |
| | | | FPDLGQEVALNANTK |
| | | | ATLYALSHAVNNYHK |
| | | | ATVAVYLESLQDTK |
| | | | AVSMPSFSILGSDVR |
| | | | CSLLVLENELNAELGLSGASMK |
| | | | CVQSTKPSLMIQK |
| | | | DAVEKPQEFTIVAFVK |
| | | | DDKHEQDMVNGIMLSVEK |
| | | | DEPTYILNIK |
| | | | DEPTYILNIKR |
| | | | DFHSEYIVSASNFTSQLSSQVEQFLHR |
| | | | DFSAEYEEDGK |
| | | | DFSAEYEEDGKYEGLQEWEGK |
| | | | DFSLWEK |
| | | | DKAQNLYQELLTQEGQASFQGLK |
| | | | DKAQNLYQELLTQEGQASFQGLKDNVF |
| | | | DGLVR |
| | | | DKDQEVLLQTFLDDASPGDK |
| | | | DKDQEVLLQTFLDDASPGDKR |
| | | | DLKVEDIPLAR |
| | | | DNVFDGLVR |
| | | | DQEVLLQTFLDDASPGDK |
| | | | DQEVLLQTFLDDASPGDKR |
| | | | DSYDLHDLK |
| | | | EAQEVFK |
| | | | EELCTMFIR |
| | | | EEYFDPSIVGWTVK |
| | | | EFNLQNMGLPDFHIPENLFLK |
| | | | EFQVPTFTIPK |
| | | | EIFNMAR |
| | | | ELCTISHIFIPAMGNITYDFSFK |
| | | | ENFAGEATLQR |
| | | | ENLCLNLHK |
| | | | EQHLFLPFSYK |
| | | | ESQLPTVMDFR |
| | | | EVGTVLSQVYSK |
| | | | EVYGFNPEGK |
| | | | EYSGTIASEANTYLNSK |
| | | | FDHTNSLNIAGLSLDFSSK |
| | | | FEVDSPVYNATWSASLK |
| | | | FEVDSPVYNATWSASLKNK |
| | | | FFGEGTK |
| | | | FFSLLSGSLNSHGLELNADILGTDK |
| | | | FIIPGLK |
| | | | FIIPSPK |
| | | | FLDMLIK |
| | | | FLDSNIK |
| | | | FNEFIQNELQEASQELQQIHQYIMALR |
| | | | FNEFIQNELQEASQELQQIHQYIMALRE |
| | | | EYFDPSIVGWTVK |
| | | | FNSSYLQGTNQITGR |
| | | | FPEVDVLTK |
| | | | FQFPGKPGIYTR |
| | | | FRETLEDTR |
| | | | FSDEGTHESQISFTIEGPLTSFGLSNK |
| | | | FSTPEFTILNTFHIPSFTIDFVEMK |
| | | | FSVPAGIVIPSFQALTAR |
| | | | FTYLINYIQDEINTIFSDYIPYVFK |
| | | | FVEGSHNSTVSLTTK |
| | | | FVEGSHNSTVSLTTKNMEVSVATTTK |
| | | | FVTQAEGAK |
| | | | GAVDHKLSLESLTSYFSIESSTK |
| | | | GAVDHKLSLESLTSYFSIESSTKGDVK |
| | | | GESKLEVLNFDFQANAQLSNPK |
| | | | GFEPTLEALFGK |
| | | | GIISALLVPPETEEAK |
| | | | GIISALLVPPETEEAKQVLFLDTVYGNC |
| | | | STHFTVK |
| | | | GISTSAASPAVGTVGMDMDEDDDFSK |
| | | | GISTSAASPAVGTVGMDMDEDDDFSK |
| | | | WNFYYSPQSSPDKK |
| | | | GLLIFDASSSWGPQMSASVHLDSK |
| | | | GLSDEAVTSLLPQLIEVSSPITLQALVQC |
| | | | GQPQCSTHILQWLK |
| | | | GMALFGEGK |
| | | | GMALFGEGKAEFTGR |
| | | | GMTRPLSTLISSSQSCQYTLDAK |
| | | | GNVATEISTER |
| | | | GTYGLSCQR |
| | | | GVISIPR |
| | | | HEQDMVNGIMLSVEK |
| | | | HFVINLIGDFEVAEK |
| | | | HINIDQFVR |
| | | | HIQNIDIQHLAGK |
| | | | HIYAISSAALSASYK |
| | | | HLIDSLIDFLNFPR |
| | | | HRHSITNPLAVLCEFISQSIK |
| | | | HSITNPLAVLCEFISQSIK |
| | | | IADFELPTIIVPEQTIEIPSIK |
| | | | IAELSATAQEIIK |
| | | | IAIANIIDEIIEK |
| | | | IAIANIIDEIIEKLK |
| | | | IDDIWNLEVK |
| | | | IDFLNNYALFLSPSAQQASWQVSAR |
| | | | IEFEWNTGTNVDTK |
| | | | IEFEWNTGTNVDTKK |
| | | | IEGNLIFDPNNYLPK |
| | | | IEIPLPFGGK |
| | | | IGQDGISTSATTNLK |
| | | | IGVELTGR |
| | | | IHSGSFQSQVELSNDQEK |
| | | | IISDYHQQFR |
| | | | ILGEELGFASLHDLQLLGK |
| | | | INNQLTLDSNTK |
| | | | INPLALK |
| | | | INPLALKESVK |
| | | | IPSVQINFK |
| | | | IQSPLFTLDANADIGNGTTSANEAGIAA |
| | | | SITAK |
| | | | ITENDIQIALDDAK |
| | | | ITEVALMGHLSCDTK |
| | | | ITLIINWLQEALSSASLAHMK |
| | | | ITLPDFR |
| | | | IVQILPWEQNEQVK |
| | | | IYSLWEHSTK |
| | | | KGISTSAASPAVGTVGMDMDEDDDFSK |
| | | | KIISDYHQQFR |
| | | | KITEVALMGHLSCDTK |
| | | | KLTISEQNIQR |
| | | | KMTSNFPVDLSDYPK |
| | | | KYTYNYEAESSSGVPGTADSR |
| | | | LAAYLMLMR |
| | | | LALWGEHTGQLYSK |
| | | | LAPGELTIIL |
| | | | LATALSLSNK |
| | | | LATALSLSNKFVEGSHNSTVSLTTK |
| | | | LDFSSQADLR |
| | | | LDFSSQADLRNEIK |
| | | | LDNIYSSDK |
| | | | LDNIYSSDKFYK |
| | | | LDVTTSIGR |
| | | | LEIQSQVDSQHVGHSVLTAK |
| | | | LELELRPTGEIEQYSVSATYELQR |
| | | | LEPLKLHVAGNLK |
| | | | LEVANMQAELVAK |
| | | | LEVANMQAELVAKPSVSVEFVTNMGIII |
| | | | PDFAR |
| | | | LEVLNFDFQANAQLSNPK |
| | | | LFLEETK |
| | | | LIDLSIQNYHTFLIYITELLK |
| | | | LIDLSIQNYHTFLIYITELLKK |
| | | | LIDVISMYR |
| | | | LIVAMSSWLQK |
| | | | LKTQFNNNEYSQDLDAYNTK |
| | | | LLLQMDSSATAYGSTVSK |
| | | | LLLQMDSSATAYGSTVSKR |
| | | | LLSGGNTLHLVSTTK |
| | | | LLSGGNTLHLVSTTKTEVIPPLIENR |
| | | | LNDLNSVLVMPTFHVPFTDLQVPSCK |
| | | | LNELSFK |
| | | | LNGEIQALELPQK |
| | | | LNGEIQALELPQKAEALK |
| | | | LNGESNLRFNSSYLQGTNQITGR |
| | | | LNIPKLDFSSQADLR |
| | | | LNTDIAGLASAIDMSTNYNSDSLHFSN |
| | | | VFR |
| | | | LPQQANDYLNSFNWER |
| | | | LPYTIITTPPLK |
| | | | LPYTIITTPPLKDFSLWEK |
| | | | LQDFSDQLSDYYEK |
| | | | LQDFSDQLSDYYEKFIAESKR |
| | | | LQSTTVMNPYMK |
| | | | LSLESLTSYFSIESSTK |
| | | | LSLESLTSYFSIESSTKGDVK |
| | | | LSLPDFK |
| | | | LSLPDFKELCTISHIFIPAMGNITYDFSFK |
| | | | LSNDMMGSYAEMK |
| | | | LSNDMMGSYAEMKFDHTNSLNIAGLSL |
| | | | DFSSK |
| | | | LSNVLQQVK |
| | | | LSQLQTYMIQFDQYIK |
| | | | LSQLQTYMIQFDQYIKDSYDLHDLK |
| | | | LTISEQNIQR |
| | | | LTLDIQNK |
| | | | LVELAHQYK |
| | | | LVGFIDDAVK |
| | | | LVGFIDDAVKK |
| | | | LYQLQVPLLGVLDLSTNVYSNLYNWSA |
| | | | SYSGGNTSTDHFSLR |
| | | | MDMTFSK |
| | | | MGLAFESTK |
| | | | MTSNFPVDLSDYPK |
| | | | MYQMDIQQELQR |
| | | | NDFFLHYIFMENAFELPTGAGLQLQISS |
| | | | SGVIAPGAK |
| | | | NFVASHIANILNSEELDIQDLK |
| | | | NFVASHIANILNSEELDIQDLKK |
| | | | NHLQLEGLFFTNGEHTSK |
| | | | NIFNFK |
| | | | NIILPVYDK |
| | | | NIQEYLSILTDPDGK |
| | | | NIQEYLSILTDPDGKGK |
| | | | NKADYVETVLDSTCSSTVQFLEYELNV |
| | | | LGTHK |
| | | | NKADYVETVLDSTCSSTVQFLEYELNV |
| | | | LGTHKIEDGTLASK |
| | | | NLLVALK |
| | | | NLLVALKDFHSEYIVSASNFTSQLSSQV |
| | | | EQFLHR |
| | | | NLQDLLQFIFQLIEDNIK |
| | | | NLQNNAEWVYQGAIR |
| | | | NLTDFAEQYSIQDWAK |
| | | | NMEVSVATTTK |
| | | | NNALDFVTK |
| | | | NNALDFVTKSYNETK |
| | | | NPNGYSFSIPVK |
| | | | NQDVHSINLPFFETLQEYFER |
| | | | NRQTIIVVLENVQR |
| | | | NSEEFAAAMSR |
| | | | NSLFFSAQPFEITASTNNEGNLK |
| | | | NSLKIEIPLPFGGK |
| | | | NTASLKYENYELTLK |
| | | | NTASLKYENYELTLKSDTNGK |
| | | | NTLELSNGVIVK |
| | | | PLSTLISSSQSCQYTLDAK |
| | | | PSLMIQK |
| | | | PSVSVEFVTNMGIIIPDFAR |
| | | | PTGEIEQYSVSATYELQR |
| | | | QGFFPDSVNK |
| | | | QHIEAIDVR |
| | | | QIDDIDVR |
| | | | QSFDLSVK |
| | | | QSMTLSSEVQIPDFDVDLGTILR |
| | | | QSWSVCK |
| | | | QTEATMTFK |
| | | | QTIIVVLENVQR |
| | | | QTVNLQLQPYSLVTTLNSDLK |
| | | | QVFLYPEK |
| | | | QVFLYPEKDEPTYILNIK |
| | | | QVFLYPEKDEPTYILNIKR |
| | | | QVFPGLNYCTSGAYSNASSTDSASYYP |
| | | | LTGDTR |
| | | | QVLFLDTVYGNCSTHFTVK |
| | | | RGIISALLVPPETEEAK |
| | | | RHIQNIDIQHLAGK |
| | | | RNLQNNAEWVYQGAIR |
| | | | SEILAHWSPAK |
| | | | SEYQADYESLR |
| | | | SFDYHQFVDETNDK |
| | | | SFDYHQFVDETNDKIR |
| | | | SGSSTASWIQNVDTK |
| | | | SGSSTASWIQNVDTKYQIR |
| | | | SGVQMNTNFFHESGLEAHVALK |
| | | | SISAALEHK |
| | | | SKPTVSSSMEFKYDFNSSMLYSTAK |
| | | | SLWDFLK |
| | | | SNTVASLHTEK |
| | | | SNTVASLHTEKNTLELSNGVIVK |
| | | | SPAFTDLHLR |
| | | | SPSQADINK |
| | | | SSVITLNTNAELFNQSDIVAHLLSSSSSV |
| | | | IDALQYK |
| | | | SVGFHLPSR |
| | | | SVMAPFTMTIDAHTNGNGK |
| | | | SVSDGIAALDLNAVANK |
| | | | SVSLPSLDPASAK |
| | | | TEHGSEMLFFGNAIEGK |
| | | | TEVIPPLIENR |
| | | | TFIEDVNK |
| | | | TFIEDVNKFLDMLIK |
| | | | TFIEDVNKFLDMLIKK |
| | | | TFQIPGYTVPVVNVEVSPFTIEMSAFGY |
| | | | VFPK |
| | | | TGISPLALIK |
| | | | TIDQMLNSELQWPVPDIYLR |
| | | | TIHDLHLFIENIDENK |
| | | | TIHDLHLFIENIDFNKSGSSTASWIQNV |
| | | | DTK |
| | | | TILGTMPAFEVSLQALQK |
| | | | TLADLTLLDSPIK |
| | | | TLADLTLLDSPIKVPLLLSEPINIIDAL |
| | | | EMR |
| | | | TLQGIPQMIGEVIR |
| | | | TNPTGTQELLDIANYLMEQIQDDCTGD |
| | | | EDYTYLILR |
| | | | TPALHFK |
| | | | TQFNNNEYSQDLDAYNTK |
| | | | TSQCTLKEVYGFNPEGK |
| | | | TSSFALNLPTLPEVK |
| | | | TSSFALNLPTLPEVKFPEVDVLTK |
| | | | TTKQSFDLSVK |
| | | | TTLTAFGFASADLIEIGLEGK |
| | | | VAWHYDEEK |
| | | | VAWHYDEEKIEFEWNTGTNVDTK |
| | | | VEDIPLAR |
| | | | VELEVPQLCSFILK |
| | | | VHANPLLIDVVTYLVALIPEPSAQQLR |
| | | | VHNGSEILFSYFQDLVITLPFELR |
| | | | VHNGSEILFSYFQDLVITLPFELRK |
| | | | VIGNMGQTMEQLTPELK |
| | | | VKHLIDSLIDFLNFPR |
| | | | VLADKFIIPGLK |
| | | | VLLDQLGTTISFER |
| | | | VLVDHFGYTK |
| | | | VNQNLVYESGSLNFSK |
| | | | VNQNLVYESGSLNFSKLEIQSQVDSQH |
| | | | VGHSVLTAK |
| | | | VNWEEEAASGLLTSLK |
| | | | VNWEEEAASGLLTSLKDNVPK |
| | | | VPLLLSEPINIIDALEMR |
| | | | VPQTDMTFR |
| | | | VPSYTLILPSLELPVLHVPR |
| | | | VSALLTPAEQTGTWK |
| | | | VSSFYAK |
| | | | VSTAFVYTK |
| | | | VTQEFHMK |
| | | | WNFYYSPQSSPDK |
| | | | WNFYYSPQSSPDKK |
| | | | YDFNSSMLYSTAK |
| | | | YDKNQDVHSINLPFFETLQEYFER |
| | | | YEDGTLSLTSTSDLQSGIIK |
| | | | YEDGTLSLTSTSDLQSGIIKNTASLK |
| | | | YEGLQEWEGK |
| | | | YENYELTLK |
| | | | YEVDQQIQVLMDK |
| | | | YEVDQQIQVLMDKLVELAHQYK |
| | | | YGMVAQVTQTLK |
| | | | YHMKADSVVDLLSYNVQGSGETTY |
| | | | DHK |
| | | | YHWEHTGLTLR |
| | | | YKLQDFSDQLSDYYEK |
| | | | YLRTEHGSEMLFFGNAIEGK |
| | | | YLSLVGQVYSTLVTYISDWWTLAAK |
| | | | YNALDLTNNGK |
| | | | YNALDLTNNGKLR |
| | | | YNQNFSAGNNENIMEAHVGINGEANLD |
| | | | FLNIPLTIPEMR |
| | | | YRITENDIQIALDDAK |
| | | | YSQPEDSLIPFFEITVPESQLTVSQFT |
| | | | LPK |
| | | | YTYNYEAESSSGVPGTADSR |
| | | | YYELEEK |
| | | | YYELEEKIVSLIK |
| P02654 | APOC1 | Apolipoprotein C-I | ARELISRIK |
| | | | EFGNTLEDK |
| | | | EWFSETFQK |
| | | | LKEFGNTLEDK |
| | | | MREWFSETFQK |
| P02656 | APOC3 | Apolipoprotein C-III | DALSSVQESQVAQQAR |
| | | | DKFSEFWDLDPEVR |
| | | | DKFSEFWDLDPEVRPTSAVAA |
| | | | DYWSTVK |
| | | | FSEFWDLDPEVR |
| | | | FSEFWDLDPEVRPTSAVAA |
| | | | GWVTDGFSSLK |
| | | | GWVTDGFSSLKDYWSTVK |
| | | | GWVTDGFSSLKDYWSTVKDK |
| | | | TAKDALSSVQESQVAQQAR |
| P55056 | APOC4 | Apolipoprotein C-IV | AWFLESK |
| | | | DGWQWFWSPSTFR |
| | | | DLGPLTK |
| | | | ELLETVVNR |
| | | | GFMQTYYDDHLR |
| | | | MKELLETVVNR |
| P02649 | APOE | Apolipoprotein E | AATVGSLAGQPLQER |
| | | | ALMDETMK |
| | | | AYKSELEEQLTPVAEETR |
| | | | DRLDEVKEQVAEVR |
| | | | FWDYLR |
| | | | GEVQAMLGQSTEELRVER |
| | | | LAVYQAGAR |
| | | | LGADMEDVCGR |
| | | | LGPLVEQGR |
| | | | LQAEAFQAR |
| | | | QWAGLVEK |
| | | | SELEEQLTPVAEETR |
| | | | SWFEPLVEDMQR |
| | | | VEQAVETEPEPELR |
| | | | VQAAVGTSAAPVPSDNH |
| | | | WELALGR |
| | | | WVQTLSEQVQEELLSSQVTQELR |
| P02749 | APOH | Beta-2-glycoprotein 1 | ATFGCHDGYSLDGPEEIECTK |
| | | | ATFGCHDGYSLDGPEEIECTKLGNWSA |
| | | | MPSCK |
| | | | ATVVYQGER |
| | | | CFKEHSSLAFWK |
| | | | CPFPSRPDNGFVNYPAK |
| | | | CPFPSRPDNGFVNYPAKPTLYYK |
| | | | CSYTEDAQCIDGTIEVPK |
| | | | CTEEGKWSPELPVCAPIICPPPSIPTFA |
| | | | TLR |
| | | | DKATFGCHDGYSLDGPEEIECTK |
| | | | DKATFGCHDGYSLDGPEEIECTKLGNW |
| | | | SAMPSCK |
| | | | DTAVFECLPQHAMFGNDTITCTTHGN |
| | | | WTK |
| | | | DTAVFECLPQHAMFGNDTITCTTHGNW |
| | | | TKLPECR |
| | | | EHSSLAFWK |
| | | | FICPLTGLWPINTLK |
| | | | KCSYTEDAQCIDGTIEVPK |
| | | | KFICPLTGLWPINTLK |
| | | | LGNWSAMPSCK |
| | | | PDDLPFSTVVPLK |
| | | | PDNGFVNYPAK |
| | | | PDNGFVNYPAKPTLYYK |
| | | | PSAGNNSLYR |
| | | | PTLYYK |
| | | | TCPKPDDLPFSTVVPLK |
| | | | TDASDVKPC |
| | | | TFYEPGEEITYSCK |
| | | | TFYEPGEEITYSCKPGYVSR |
| | | | VCPFAGILENGAVR |
| | | | VYKPSAGNNSLYR |
| | | | VYKPSAGNNSLYRDTAVFECLPQHAMF |
| | | | GNDTITCTTHGNWTK |
| | | | WSPELPVCAPIICPPPSIPTFATLR |
| | | | YTTFEYPNTISFSCNTGFYLNGADSAK |
| O95445 | APOM | Apolipoprotein M | AFLLTPR |
| | | | DGLCVPR |
| | | | EELATFDPVDNIVFNMAAGSAPMQL |
| | | | HLR |
| | | | EFPEVHLGQWYFIAGAAPTK |
| | | | EFPEVHLGQWYFIAGAAPTKEELATFD |
| | | | PVDNIVFNMAAGS |
| | | | APMQLHLR |
| | | | FLLYNR |
| | | | KWIYHLTEGSTDLR |
| | | | MAAGSAPMQLHLR |
| | | | MFHQIWAALLYFYGIILNSIYQCPEHSQL |
| | | | TTLGVDGK |
| | | | NQEACELSNN |
| | | | SLTSCLDSK |
| | | | TEGRPDMKTELFSSSCPGGIMLNETGQ |
| | | | GYQR |
| | | | TELFSSSCPGGIMLNETGQGYQR |
| | | | WIYHLTEGSTDLR |
| P07306 | ASGR1 | Asialoglycoprotein | ETFSNFTASTEAQVK |
| | | receptor 1 | LEDAHLVVVTSWEEQK |
| | | | SLSCQMAALQGNGSER |
| P07307 | ASGR2 | Asialoglycoprotein | ADHDALLFHLK |
| | | receptor 2 | EAFSNFSSSTLTEVQAISTHGGSVGDK |
| | | | FIVQHTNPFNTWIGLTDSDGSWK |
| | | | FVACQMELLHSNGSQR |
| | | | NWAVTQPDNWHGHELGGSEDCVEVQ |
| | | | PDGR |
| | | | TCCPVNWVEHQGSCYWFSHSGK |
| | | | WNDDFCLQVYR |
| | | | YCQLENAHLVVINSWEEQK |
| O75882 | ATRN | Attractin | AATCINPLNGSVCER |
| | | | AATCINPLNGSVCERPANHSAK |
| | | | AVVNGNIMWVVGGYMFNHSDYNMVLA |
| | | | YDLASR |
| | | | CFSSDFMAYDIACDR |
| | | | CNPGTGQCVCPAGWVGEQCQHCGGR |
| | | | CTWLIEGQPNR |
| | | | CVWNTGSSQCISWALATDEQEEK |
| | | | DGNETVPEVVATSGYALLHFFSDAAYN |
| | | | LTGFNITYSFDMC |
| | | | PNNCSGR |
| | | | DLDMFINASK |
| | | | DNPMYYCNK |
| | | | EEYSNLKLPR |
| | | | EQYAVVGHSAHIVTLK |
| | | | FGHSAVLHNSTMYVFGGFNSLLLSDILV |
| | | | FTSEQCDAHR |
| | | | FNHFATECSWDHLYVYDGDSIYAPLVA |
| | | | AFSGLIVPER |
| | | | GCSCFSDWQGPGCSVPVPANQSF |
| | | | WTR |
| | | | GDECQLCEVENR |
| | | | GEACDIPHCTDNCGFPHR |
| | | | GPVKMPSQAPTGNFYPQPLLNSSMCL |
| | | | EDSR |
| | | | HCETCISGFYGDPTNGGK |
| | | | IDSTGNVTNELR |
| | | | IDSTGNVTNELRVFHIHNESWVLLTPK |
| | | | INVSYWCWEDMSPFTNSLLQWMPSEP |
| | | | SDAGFCGILSEPSTR |
| | | | ISNSSDTVECECSENWK |
| | | | KINVSYWCWEDMSPFTNSLLQWMPSE |
| | | | PSDAGFCGILSEPSTR |
| | | | KVEFVLK |
| | | | LADDLYRYDVDTQMWTILK |
| | | | LADDLYRYDVDTQMWTILKDSR |
| | | | LTGSSGFVTDGPGNYK |
| | | | LTLTPWVGLR |
| | | | MPSQAPTGNFYPQPLLNSSMCLEDSR |
| | | | NFNLNITWAASFSAGTQAGEEMPVVSK |
| | | | NHNALLASLTTQK |
| | | | NHPNITFFVYVSNFTWPIK |
| | | | NHSCSEGQISIFR |
| | | | NQECIALPENICGIGWHLVGNSCLK |
| | | | NTWSILHTQGALVQGGYGHSSVYDHR |
| | | | SCALDQNCQWEPR |
| | | | SEAACLAAGPGIR |
| | | | SVNNVVVR |
| | | | TACGDCTSGSSECMWCSNMK |
| | | | VFHIHNESWVLLTPK |
| | | | VVMLVIFGHCPLYGYISNVQEYDLDK |
| | | | WSVLPRPDLHHDVNR |
| | | | YDVDTQMWTILK |
| | | | YDVDTQMWTILKDSR |
| | | | YGHSLALYK |
| | | | YLHTAVIVSGTMLVFGGNTHNDTSMSH |
| | | | GAK |
| | | | YNWSFIHCPACQCNGHSK |
| | | | YYTAINFVATPDEQNR |
| | | | YYTAINFVATPDEQNRDLDMFINASK |
| P20160 | AZU1 | Azurocidin | EANLTSSVTILPLPLQNATVEAGTR |
| | | | FVNVTVTPEDQCR |
| | | | FVNVTVTPEDQCRPNNVCTGVLTR |
| Q9NY97 | B3GNT2 | N-acetyllactosaminide | CRNYSLLIDQPDK |
| | | beta-1,3-N- | DLFIGDVIHNAGPHR |
| | | acetylglucosaminyltransferase | DTFFNLSLK |
| | | 2 | ESWGQESNAGNQTVVR |
| | | | KPQEMIDIWSQLQSAHLK |
| | | | LSNISHLNYCEPDLR |
| | | | QYNPILSMLTNQTGEAGR |
| | | | VTSVVTGFNNLPDR |
| | | | WVSTSCPDTEFVFK |
| P15291 | B4GALT1 | Beta-1,4- | DYDYTCFVFSDVDLIPMNDHNAYR |
| | | galactosyltransferase 1 | ETMLSDGLNSLTYQVLDVQR |
| | | | FGFSLPYVQYFGGVSALSK |
| | | | LLNVGFQEALK |
| | | | LPQLVGVSTPLQGGSNSAAAIGQSSG |
| | | | ELR |
| | | | QQLDYGIYVINQAGDTIFNR |
| | | | YWLYYLHPVLQR |
| P06276 | BCHE | Cholinesterase | AILQSGSFNAPWAVTSLYEAR |
| | | | DEGTAFLVYGAPGFSK |
| | | | DNNSIITR |
| | | | DNYTKAEEILSR |
| | | | EALGDVVGDYNFICPALEFTK |
| | | | ENETEIIK |
| | | | ESILFHYTDWVDDQRPENYR |
| | | | FSEWGNNAFFYYFEHR |
| | | | FWTSFFPK |
| | | | GMNLTVFGGTVTAFLGIPYAQPPLGR |
| | | | IFFPGVSEFGK |
| | | | LPWPEWMGVMHGYEIEFVFGLPLER |
| | | | NIAAFGGNPK |
| | | | NKDPQEILLNEAFVVPYGTPLSVNFGPT |
| | | | VDGDFLTDMPD |
| | | | ILLELGQFK |
| | | | NQFNDYTSK |
| | | | SVTLFGESAGAASVSLHLLSPGSHSL |
| | | | FTR |
| | | | TQILVGVNK |
| | | | TQILVGVNKDEGTAFLVYGAPGFSK |
| | | | VGALGFLALPGNPEAPGNMGLFDQQL |
| | | | ALQWVQK |
| | | | VIVVSMNYR |
| | | | VLEMTGNIDEAEWEWK |
| | | | WNNYMMDWK |
| | | | WSDIWNATK |
| | | | YANSCCQNIDQSFPGFHGSEMWNPNT |
| | | | DLSEDCLYLNVWIPAPK |
| | | | YGNPNETQNNSTSWPVFK |
| | | | YLTLNTESTR |
| Q8TDL5 | BPIFB1 | BPI fold-containing family | AAVAAVLSPEEFMVLLDSVLPESAHR |
| | | B member 1 | ALGFEAAESSLTK |
| | | | ALGFEAAESSLTKDALVLTPASLWKPS |
| | | | SPVSQ |
| | | | DHNATSILQQLPLLSAMR |
| | | | EKPAGGIPVLGSLVNTVLK |
| | | | GDQLILNLNNISSDR |
| | | | ILTQDTPEFFIDQGHAK |
| | | | IQLMNSGIGWFQPDVLK |
| | | | LEFDLLYPAIK |
| | | | LVLSDCATSHGSLR |
| | | | NIITEIIHSILLPNQNGK |
| | | | TIVEFHMTTEAQATIR |
| | | | VPISLSIDR |
| | | | WFNNSAASLTMPTLDNIPFSLIVSQD |
| | | | VVK |
| P35613 | BSG | Basigin | ILLTCSLNDSATEVTGHR |
| | | | SELHIENLNMEADPGQYR |
| P43251 | BTD | Biotinidase | DVQIIVFPEDGIHGFNFTR |
| | | | FNDTEVLQR |
| | | | GDMFLVANLGTK |
| | | | HNLYFEAAFDVPLK |
| | | | HVVYPTAWMNQLPLLAAIEIQK |
| | | | ILSGDPYCEKDAQEVHCDEATK |
| | | | KHNLYFEAAFDVPLK |
| | | | LSSGLVTAALYGR |
| | | | NPVGLIGAENATGETDPSHSK |
| | | | QEALELMNQNLDIYEQQVMTAAQK |
| | | | SHLIIAQVAK |
| | | | TSIYPFLDFMPSPQVVR |
| | | | VDLITFDTPFAGR |
| | | | WNPCLEPHR |
| | | | WNPCLEPHRFNDTEVLQR |
| | | | WNVNAPPTFHSEMMYDNFTLVPVWGK |
| | | | YQFNTNVVFSNNGTLVDR |
| P00736 | C1R | Complement C1r | CLPVCGKPVNPVEQR |
| | | subcomponent | EHEAQSNASLDVFLGHTNVEELMK |
| | | | ESEQGVYTCTAQGIWK |
| | | | FCGQLGSPLGNPPGK |
| | | | FCGQLGSPLGNPPGKK |
| | | | FLEPFDIDDHQQVHCPYDQLQIYANGK |
| | | | FVRLPVANPQACENWLR |
| | | | GFLAYYQAVDLDECASR |
| | | | GGGALLGDRWILTAAHTLYPK |
| | | | GLTLHLK |
| | | | GYGFYTK |
| | | | IQYYCHEPYYK |
| | | | LFGEVTSPLFPK |
| | | | LFGEVTSPLFPKPYPNNFETTTVITVPT |
| | | | GYR |
| | | | LPVANPQACENWLR |
| | | | LVFQQFDLEPSEGCFYDYVK |
| | | | MDVFSQNMFCAGHPSLK |
| | | | MGNFPWQVFTNIHGR |
| | | | MLLTFHTDFSNEENGTIMFYK |
| | | | PYPNNFETTTVITVPTGYR |
| | | | QDACQGDSGGVFAVR |
| | | | QDESYNFEGDIALLELENSVTLGPNLLP |
| | | | ICLPDNDTFYDL |
| | | | GLMGYVSGFGVMEEK |
| | | | QGYQLIEGNQVLHSFTAVCQDDGT |
| | | | WHR |
| | | | QRPPDLDTSSNAVDLLFFTDESGDSR |
| | | | SGEEDPQPQCQHLCHNYVGGYFCSCR |
| | | | TLDEFTIIQNLQPQYQFR |
| | | | VLNYVDWIK |
| | | | VLNYVDWIKK |
| | | | WILTAAHTLYPK |
| | | | WVATGIVSWGIGCSR |
| | | | YTTEIIK |
| | | | YTTTMGVNTYK |
| P09871 | C1S | Complement C1s | CEYQIR |
| | | subcomponent | CQPVDCGIPESIENGK |
| | | | CQPVDCGIPESIENGKVEDPESTLFGS |
| | | | VIR |
| | | | CVPVCGVPR |
| | | | DVVQITCLDGFEVVEGR |
| | | | EDFDVEAADSAGNCLDSLVFVAGDR |
| | | | EDTPNSVWEPAK |
| | | | EPTMYVGSTSVQTSR |
| | | | FYAAGLVSWGPQCGTYGLYTR |
| | | | GDSGGAFAVQDPNDK |
| | | | GFQVVVTLR |
| | | | IIGGSDADIK |
| | | | LLEVPEGR |
| | | | LPVAPLR |
| | | | LQVIFK |
| | | | MGPTVSPICLPGTSSDYNLMDGDLGLIS |
| | | | GWGR |
| | | | MLTPEHVFIHPGWK |
| | | | NCGVNCSGDVFTALIGEIASPNYPK |
| | | | NCGVNCSGDVFTALIGEIASPNYPKPYP |
| | | | ENSR |
| | | | NCGVNCSGDVFTALIGEIASPNYPKPYP |
| | | | ENSRCEYQIR |
| | | | NFPWQVFFDNPWAGGALINEYWVLTA |
| | | | AHVVEGNR |
| | | | NYVDWIMK |
| | | | QFGPYCGHGFPGPLNIETK |
| | | | REDFDVEAADSAGNCLDSLVFVAGDR |
| | | | SNALDIIFQTDLTGQK |
| | | | SSNNPHSPIVEEFQVPYNK |
| | | | SWDIEVPEGYGIHLYFTHLDIELSENCA |
| | | | YDSVQIISGDTEEGR |
| | | | TNFDNDIALVR |
| | | | VEDPESTLFGSVIR |
| | | | VEKPTADAEAYVFTPNMICAGGEK |
| | | | VGATSFYSTCQSNGK |
| | | | YHGDPMPCPKEDTPNSVWEPAK |
| | | | YTCEEPYYYMENGGGGEYHCAGNGS |
| | | | WVNEVLGPELPK |
| P13671 | C6 | Complement component | AKDLHLSDVFLK |
| | | C6 | ALNHLPLEYNSALYSR |
| | | | CLNNQQLHFLHIGSCQDGR |
| | | | CLPDGTWR |
| | | | CPINCLLGDFGPWSDCDPCIEK |
| | | | CVCLLPPQCFK |
| | | | DLHLSDVFLK |
| | | | DLTSLGHNENQQGSFSSQGGSSFSVPI |
| | | | FYSSK |
| | | | ECNNPAPQR |
| | | | ENPAVIDFELAPIVDLVR |
| | | | ESCGYDTCYDWEK |
| | | | EVDLPEIEADSGCPQPVPPENGFIR |
| | | | GEVLDNSFTGGICK |
| | | | GFVVAGPSR |
| | | | GGNQLYCVK |
| | | | IEEADCK |
| | | | IFDDFGTHYFTSGSLGGVYDLLYQFSSE |
| | | | ELK |
| | | | IFDDFGTHYFTSGSLGGVYDLLYQFSSE |
| | | | ELKNSGLTEEEAK |
| | | | IGESIELTCPK |
| | | | KESCGYDTCYDWEK |
| | | | KLECNGENDCGDNSDER |
| | | | KYNPIPSVQLMGNGFHFLAGEPR |
| | | | PSQFGGQPCTAPLVAFQPCIPSK |
| | | | QAIQASHK |
| | | | QLEWGLER |
| | | | QLYLVGEDVEISCLTGFETVGYQYFR |
| | | | RQEEDCTFSIMENNGQPCINDDEEMK |
| | | | RQEEDCTFSIMENNGQPCINDDEEMKE |
| | | | VDLPEIEADSGCP |
| | | | QPVPPENGFIR |
| | | | SEYGAALAWEK |
| | | | SNAVDGQWGCWSSWSTCDATYK |
| | | | SVLRPSQFGGQPCTAPLVAFQPCIPSK |
| | | | TFSEWLESVK |
| | | | TFSEWLESVKENPAVIDFELAPIVDLVR |
| | | | TLNICEVGTIR |
| | | | VLNFTTK |
| | | | VPANLENVGFEVQTAEDDLK |
| | | | VPANLENVGFEVQTAEDDLKTDFYK |
| | | | YNPIPSVQLMGNGFHFLAGEPR |
| | | | YTCQGNSWTPPISNSLTCEK |
| | | | YYQENFCEQICSK |
| P54289 | CACNA2D1 | Voltage-dependent | DAVNNITAK |
| | | calcium channel subunit | EPVTLDFLDAELENDIK |
| | | alpha-2/delta-1 | GFSFAFEQLLNYNVSR |
| | | | HLVNISVYAFNK |
| | | | IDVNSWIENFTK |
| | | | ISDNNTEFLLNFNEFID R |
| | | | LLIQAEQTSDGPNPCDMVK |
| | | | NREEDPSLLWQVFGSATGLAR |
| | | | PDNFEESGYTFIAPR |
| | | | SFSGVLDCGNCSR |
| | | | SLDNDNYVFTAPYFNK |
| | | | SYDYQSVCEPGAAPK |
| Q6YHK3 | CD109 | CD109 antigen | EALNMLTWR |
| | | | FLVTAPGIIRPGGNVTIGVELLEHCPSQ |
| | | | VTVK |
| | | | GISDNYTLALITYALSSVGSPK |
| | | | HLNGTITAK |
| | | | IEFPILEDSSELQLK |
| | | | INGSANFSFNDEEMK |
| | | | INYTVPQSGTFK |
| | | | IPVQLVFK |
| | | | ISVTQPDSIVGIVAVDK |
| | | | IVTLFSDFKPYK |
| | | | LNLYLDSVNETQFCVNIPAVR |
| | | | NYTEYWSGSNSGNQK |
| | | | PGGNVTIGVELLEHCPSQVTVK |
| | | | QHDYIIEFFDYTTVLKPSLNFTATVK |
| | | | QNSTMFSLTPENSWTPK |
| | | | SGMALMEVNLLSGFMVPSEAISLSETV |
| | | | KKVEYDHGK |
| | | | SNLIQQWLSQQSDLGVISK |
| | | | TASNLTVSVLEAEGVFEK |
| | | | TLTLPSLPLNSADEIYELR |
| | | | TNIQVTVTGPSSPSPVK |
| | | | TQDEILFSNSTR |
| | | | VGSPFELVVSGNK |
| | | | VQITAIGDVLGPSINGLASLIR |
| | | | YQPNIDVQESIHFLESEFSR |
| P08571 | CD14 | Monocyte differentiation | AFPALTSLDLSDNPGLGER |
| | | antigen CD14 | APQPDELPEVDNLTLDGNPFLVPGTAL |
| | | | PHEGSMNSGVVPACAR |
| | | | CMWSSALNSLNLSFAGLEQVPK |
| | | | CVCNFSEPQPDWSEAFQCVSAVEVEIH |
| | | | AGGLNLEPFLK |
| | | | ELTLEDLK |
| | | | FPAIQNLALR |
| | | | GLMAALCPHK |
| | | | ITGTMPPLPLEATGLALSSLR |
| | | | LKELTLEDLK |
| | | | LRNVSWATGR |
| | | | LTVGAAQVPAQLLVGALR |
| | | | NVSWATGR |
| | | | RLTVGAAQVPAQLLVGALR |
| | | | SWLAELQQWLK |
| | | | SWLAELQQWLKPGLK |
| | | | VLDLSCNR |
| | | | VLSIAQAHSPAFSCEQVR |
| Q86VB7 | CD163 | Scavenger receptor | AMSIPMWVDNVQCPK |
| | | cysteine-rich type 1 | APGWANSSAGSGR |
| | | protein M130 | CAGTVEVEIQR |
| | | | CGVALSTPGGAR |
| | | | CKGNESSLWDCPAR |
| | | | EAEFGQGTGPIWLNEVK |
| | | | EDAAVNCTDISVQK |
| | | | EDAGVICSEFMSLR |
| | | | FQGEWGTICDDGWDSYDAAVACK |
| | | | GNESALWDCK |
| | | | GNESSLWDCPAR |
| | | | GPDTLWQCPSSPWEK |
| | | | HGDTWGSICDSDFSLEAASVLCR |
| | | | HKEDAGVICSEFMSLR |
| | | | HSNCTHQQDAGVTCSDGSNLEMR |
| | | | HYCNHNEDAGVTCSDGSDLELR |
| | | | IQATNTWLFLSSCNGNETSLWDCK |
| | | | IWMDHVSCRGNESALWDCK |
| | | | LASPSEETWITCDNK |
| | | | LEVFYNGAWGTVGK |
| | | | LVDGVTECSGR |
| | | | LVGGDIPCSGR |
| | | | NWQWGGLTCDHYEEAK |
| | | | QLGCGEAINATGSAHFGEGTGPIWLD |
| | | | EMK |
| | | | QLGCPTAVTAIGR |
| | | | SSMSETTVGVVCR |
| | | | TLGAWGSLCNSHWDIEDAHVLCQQLK |
| | | | VEIWHGGSWGTVCDDSWDLDDAQVV |
| | | | CQQLGCGPALK |
| | | | VEIYHEGSWGTICDDSWDLSDAHVVCR |
| | | | VQEEWGTVCNNGWSMEAVSVICNQLG |
| | | | CPTAIK |
| | | | WGHSECGHKEDAAVNCTDISVQK |
| | | | WGTVCDDNFNIDHASVICR |
| Q8N6Q3 | CD177 | CD177 antigen | GATHCYDGYIHLSGGGLSTK |
| | | | MSIQGCVAQPSSFLLNHTR |
| | | | QEDFCNNLVNSLPLWAPQPPADPG |
| | | | SLR |
| P08174 | CD55 | Complement decay- | DSVICLKGSQWSDIEEFCNR |
| | | accelerating factor | EIYCPAPPQIDNGIIQGER |
| | | | GFTMIGEHSIYCTVNNDEGEWSGPPP |
| | | | ECR |
| | | | GSQWSDIEEFCNR |
| | | | LTCLQNLK |
| | | | QPYITQNYFPVGTVVEYECR |
| | | | TPSAAQNPMMTNASATQATLTAQK |
| P13987 | CD59 | CD59 glycoprotein | ENELTYYCCK |
| | | | LRENELTYYCCK |
| | | | TAVNCSSDFDACLITK |
| P04233 | CD74 | HLA class II | CQEEVSHIPAVHPGSFR |
| | | histocompatibility antigen | ESLELEDPSSGLGVTK |
| | | gamma chain | GHHNCSESLELEDPSSGLGVTK |
| | | | MATPLLMQALPMGALPQGPMQNATK |
| | | | YGNMTEDHVMHLLQNADPLK |
| P33151 | CDH5 | Cadherin-5 | AQVIINITDVDEPPIFQQPFYHFQLK |
| | | | DTGENLETPSSFTIK |
| | | | DWIWNQMHIDEEK |
| | | | DWIWNQMHIDEEKNTSLPHHVGK |
| | | | ELDREVYPWYNLTVEAK |
| | | | ELDSTGTPTGKESIVQVHIEVLDENDNA |
| | | | PEFAKPYQPK |
| | | | ENISEYHLTAVIVDK |
| | | | ESIVQVHIEVLDENDNAPEFAK |
| | | | ESIVQVHIEVLDENDNAPEFAKPYQPK |
| | | | EVYPWYNLTVEAK |
| | | | FILNTENNFTLTDNHDNTANITVK |
| | | | GDYQDAFTIETNPAHNEGIIKPMKPLDY |
| | | | EYIQQYSFIVEATDPTIDLR |
| | | | KPLIGTVLAMDPDAAR |
| | | | LDRENISEYHLTAVIVDK |
| | | | LDRENISEYHLTAVIVDKDTGENLETPS |
| | | | SFTIK |
| | | | SVPEIHEQLVTYDEEGGGEMDTTSYDV |
| | | | SVLNSVRR |
| | | | VGTSVGSLFVEDPDEPQNR |
| | | | VHDVNDNWPVFTHR |
| | | | VHFLPVVISDNGMPSR |
| | | | YEIVVEAR |
| | | | YTFVVPEDTR |
| Q9HBB8 | CDHR5 | Cadherin-related family | DIFEVEENTNVTEPLVDIHVPEGQEVTL |
| | | member 5 | GALSTPFAFR |
| | | | GNVNGTFIIHPDSGNLTVAR |
| | | | IQAQDPEFSDLNSAITYR |
| | | | IQGNQLFLNVTPDYEEK |
| | | | LDRPLDFYERPNMTFWLLVR |
| | | | SLLEAQLLCQSGGTLVTQLR |
| | | | VEEDTKVNSTVIPETQLQAEDR |
| | | | VFVSVLDVNDNAPEFPFK |
| | | | VNSTVIPETQLQAEDR |
| P13688 | CEACAM1 | Carcinoembryonic | DAVAFTCEPETQDTTYLWWINNQSLPV |
| | | antigen-related cell | SPR |
| | | adhesion molecule 1 | DSVNLTCSTNDTGISIR |
| | | | EDAGTYWCEVFNPISK |
| | | | ETIYPNASLLIQNVTQNDTGFYTLQVIK |
| | | | EVLLLVHNLPQQLFGYSWYK |
| | | | LSQGNTTLSINPVK |
| | | | NDTGPYECEIQNPVSANR |
| | | | NQSLPSSERMKLSQGNTTLSINPVK |
| | | | QIVGYAIGTQQATPGPANSGR |
| | | | SDLVNEEATGQFHVYPELPKPSISSNN |
| | | | SNPVEDK |
| | | | SDPVTLNVTYGPDTPTISPSDTYYR |
| | | | TTVTGDKDSVNLTCSTNDTGISIR |
| | | | TLTLLSVTR |
| P11597 | CETP | Cholesteryl ester transfer | AASILSDGDIGVDISLTGDPVITASYLES |
| | | protein | HHK |
| | | | AMMLLGQVK |
| | | | ASYPDITGEK |
| | | | DGFLLLQMDFGFPEHLLVDFLQSLS |
| | | | EINVISNIMADFVQTR |
| | | | FLFPRPDQQHSVAYTFEEDIVTTVQASY |
| | | | SK |
| | | | GHFIYKNVSEDLPLPTFSPTLLGDSR |
| | | | GVSLFDIINPEIITR |
| | | | GVVVNSSVMVK |
| | | | ITKPALLVLNHETAK |
| | | | LEVVFTALMNSK |
| | | | LFLSLLDFQITPK |
| | | | LMLSLMGDEFK |
| | | | MLAATVLTLALLGNAHACSK |
| | | | MLYFWFSER |
| | | | NVSEDLPLPTFSPTLLGDSR |
| | | | QLFTNFISFTLK |
| | | | SIDVSIQNVSVVFK |
| | | | TDAPDCYLSFHK |
| | | | TVSNLTESSSESVQSFLQSMITAVGIPE |
| | | | VMSR |
| | | | YGLHNIQISHLSIASSQVELVEAK |
| Q9BXR6 | CFHR5 | Complement factor H- | AMISSPPFR |
| | | related protein 5 | CLDPCVVSEENMNK |
| | | | CVESTAYCGPPPSINNGDTTSFPLSVY |
| | | | PPGSTVTYR |
| | | | EEYGHNEVVEYDCNPNFIINGPK |
| | | | ENYLLPEAK |
| | | | EQFCPPPPQIPNAQNMTTTVNYQDGEK |
| | | | FEYPICE |
| | | | GECHVPILEANVDAQPK |
| | | | GWSTPPICSFTK |
| | | | IHHGFLYDEEDYNPFSQVPTGEVFYYS |
| | | | CEYNFVSPSK |
| | | | IQCVDGEWTTLPTCVEQVK |
| | | | ITCTEEGWSPTPK |
| | | | KEEYGHNEVVEYDCNPNFIINGPK |
| | | | KIQCVDGEWTTLPTCVEQVK |
| | | | LQGSVTVTCR |
| | | | MCSFPFVK |
| | | | NEYAMIGNNMITCINGIWTELPMCVATH |
| | | | QLK |
| | | | NGHSESSGLIHLEGDTVQIICNTGYSLQ |
| | | | NNEK |
| | | | NGHSESSGLIHLEGDTVQIICNTGYSLQ |
| | | | NNEKNISCVER |
| | | | REQFCPPPPQIPNAQNMTTTVNYQDG |
| | | | EK |
| | | | SCGPPPQLSNGEVK |
| | | | TCGYIPELEYGYVQPSVPPYQHGVSVE |
| | | | VNCR |
| | | | TGDAVEFQCK |
| | | | VGSDSVQCYQFGWSPNFPTCK |
| | | | WNPEVDCTEK |
| P27918 | CFP | Properdin | CSAPEPSQKPPGKPCPGLAYEQR |
| | | | GLLGGGVSVEDCCLNTAFAYQK |
| | | | ITEGAQAPR |
| | | | LCTPLLPK |
| | | | NVTFWGR |
| | | | NVTFWGRPLPR |
| | | | PCPGLAYEQR |
| | | | SISCQEIPGQQSR |
| | | | YPPTVSMVEGQGEK |
| | | | YPPTVSMVEGQGEKNVTFWGR |
| | | | YPPTVSMVEGQGEKNVTFWGRPLPR |
| P36222 | CHI3L1 | Chitinase-3-like protein 1 | EAGTLAYYEICDFLR |
| | | | EGDGSCFPDALDR |
| | | | FLCTHIIYSFANISNDHIDTWEWNDVTLY |
| | | | GMLNTLK |
| | | | FPLTNAIK |
| | | | FSNTDYAVGYMLR |
| | | | GNQWVGYDDQESVK |
| | | | ILGQQVPYATK |
| | | | ISQHLDFISIMTYDFHGAWR |
| | | | LVCYYTSWSQYR |
| | | | LVMGIPTFGR |
| | | | QLAGAMVWALDLDDFQGSFCGQDLR |
| | | | QLLLSAALSAGK |
| | | | SFTLASSETGVGAPISGPGIPGR |
| | | | SVPPFLR |
| | | | THGFDGLDLAWLYPGR |
| | | | TLLSVGGWNFGSQR |
| | | | VTIDSSYDIAK |
| P05452 | CLEC3B | Tetranectin | CFLAFTQTK |
| | | | DQLPYICQFGIV |
| | | | EQQALQTVCLK |
| | | | GGTLGTPQTGSENDALYEYLR |
| | | | LDTLAQEVALLK |
| | | | MFEELK |
| | | | NWETEITAQPDGGK |
| | | | QSVGNEAEIWLGLNDMAAEGTWVDMT |
| | | | GAR |
| | | | SRLDTLAQEVALLK |
| | | | TENCAVLSGAANGK |
| | | | TFHEASEDCISR |
| P10909 | CLU | Clusterin | ASSIIDELFQDR |
| | | | ASSIIDELFQDRFFTR |
| | | | EDALNETR |
| | | | EILSVDCSTNNPSQAK |
| | | | EIQNAVNGVK |
| | | | ELDESLQVAER |
| | | | ELPGVCNETMMALWEECK |
| | | | ELPGVCNETMMALWEECKPCLK |
| | | | EPQDTYHYLPFSLPHR |
| | | | FFTREPQDTYHYLPFSLPHR |
| | | | FMETVAEK |
| | | | HNSTGCLR |
| | | | DSLLENDR |
| | | | KTLLSNLEEAK |
| | | | KTLLSNLEEAKK |
| | | | LANLTQGEDQYYLR |
| | | | LANLTQGEDQYYLRVTTVASHTSDSDV |
| | | | PSGVTEVVVK |
| | | | LFDSDPITVTVPVEVSR |
| | | | LKELPGVCNETMMALWEECKPCLK |
| | | | MLNTSSLLEQLNEQFNWVSR |
| | | | QLEEFLNQSSPFYFWMNGDR |
| | | | QLEEFLNQSSPFYFWMNGDRIDSLLEN |
| | | | DR |
| | | | QLEEFLNQSSPFYFWMNGDRIDSLLEN |
| | | | DRQQTHMLDVMQDHFSR |
| | | | QQTHMLDVMQDHFSR |
| | | | RELDESLQVAER |
| | | | SYQWKMLNTSSLLEQLNEQFNWVSR |
| | | | TLLSNLEEAK |
| | | | TLLSNLEEAKK |
| | | | VTTVASHTSDSDVPSGVTEVVVK |
| | | | VTTVASHTSDSDVPSGVTEVVVKLFDS |
| | | | DPITVTVPVEVSR |
| | | | YNELLK |
| Q96KN2 | CNDP1 | Beta-Ala-His dipeptidase | AIHLDLEEYR |
| | | | AIHLDLEEYRNSSR |
| | | | ALEQDLPVNIK |
| | | | DQDFHSGTFGGILHEPMADLVALLGSL |
| | | | VDSSGHILVPGI |
| | | | YDEVVPLTEEEINTYK |
| | | | EEILMHLWR |
| | | | EWVAIESDSVQPVPR |
| | | | FFSGVDYIVISDNLWISQR |
| | | | FIIEGMEEAGSVALEELVEK |
| | | | FLFDTK |
| | | | GDGWLTDPYVLTEVDGK |
| | | | GNSYFMVEVK |
| | | | GPVLAWINAVSAFR |
| | | | GTVCFYGHLDVQPADR |
| | | | HLEDVFSK |
| | | | LFAAFFLEMAQLH |
| | | | LVPHMNVSAVEK |
| | | | MMAVAADTLQR |
| | | | MVVSMTLGLHPWIANIDDTQYLAAK |
| | | | SVVLIPLGAVDDGEHSQNEK |
| | | | TVFGTEPDMIR |
| | | | VFQYIDLHQDEFVQTLK |
| | | | WNYIEGTK |
| | | | YPSLSIHGIEGAFDEPGTK |
| Q12860 | CNTN1 | Contactin-1 | ANSTGTLVITDPTR |
| | | | AVDLIPWMEYEFR |
| | | | DVYALMGQNVTLECFALGNPVPDIR |
| | | | FIPLIPIPER |
| | | | FVSQTNGNLYIANVEASDKGNYSCFVS |
| | | | SPSITK |
| | | | GGEKNMVDSFLPVCASLPPTW |
| | | | GMVLLCDPPYHFPDDLSYR |
| | | | GNYSCFVSSPSITK |
| | | | GTEWLVNSSR |
| | | | ILIWEDGSLEINNITR |
| | | | IYVQAFPEWVEHINDTEVDIGSDLYWPC |
| | | | VATGK |
| | | | STEATLSFGYLDPFPPEERPEVR |
| | | | TTKPYPADIVVQFK |
| | | | VLEPMPSTAEISTSGAVLK |
| | | | WLLNEFPVFITMDK |
| | | | YTCTAQTIVDNSSASADLVVR |
| O75976 | CPD | Carboxypeptidase D | AEATTTTTSAGAEAAEGQFDRYYHEEE |
| | | | LESALR |
| | | | DSITGSGLENATISVAGINHNITTGR |
| | | | FANEYPNITR |
| | | | GILNATISVAEINHPVTTYK |
| | | | GLVMNYPHITNLTNLGQSTEYR |
| | | | NMYPNEYFPHGITNGASWYNVPGGMQ |
| | | | DWNYLQTNCFEVTI |
| | | | ELGCVK |
| | | | YYHEEELESALR |
| P22792 | CPN2 | Carboxypeptidase N | AFGSNPNLTK |
| | | subunit 2 | AGGSWDLAVQER |
| | | | DHLGFQVTWPDESK |
| | | | DLEELVK |
| | | | GQVVPALNEK |
| | | | LEDLEVTGSSFLNLSTNIFSNLTSLGK |
| | | | LELLSLSK |
| | | | LFQPLTHLK |
| | | | LGSLQELFLDSNNISELPPQVFSQLFCL |
| | | | ER |
| | | | LLNIQTYCAGPAYLK |
| | | | LSNNALSGLPQGVFGK |
| | | | LTLNFNMLEALPEGLFQHLAALESLHLQ |
| | | | GNQLQALPR |
| | | | LTVSIEAR |
| | | | LYLGSNNLTALHPALFQNLSK |
| | | | LYLGSNNLTALHPALFQNLSKLELLSL |
| | | | SK |
| | | | NAITHLPLSIFASLGNLTFLSLQWNMLR |
| | | | NIIFVETSFTTLETR |
| | | | NQLTTLPEGIFDTNYNLFNLALHGNPW |
| | | | QCDCHLAYLFNWLQQYTDR |
| | | | PDAFGGLPR |
| | | | QLVCPVTR |
| | | | SLMLSYNAITHLPAGIFR |
| | | | SLMLSYNAITHLPAGIFRDLEELVK |
| | | | SQCTYSNPEGTVVLACDQAQCR |
| | | | TLNLAQNLLAQLPEELFHPLTSLQTLK |
| | | | VLPAGLFAHTPCLVGLSLTHNQLETVAE |
| | | | GTFAHLSNLR |
| | | | VVFLNTQLCQFR |
| | | | VVFLNTQLCQFRPDAFGGLPR |
| | | | WLNVQLSPQQGSLGLQYNASQEWDLR |
| P20023 | CR2 | Complement receptor | CELSTSAVQCPHPQILR |
| | | type 2 | EAPYFYNDTVTFK |
| | | | EVNCSSPADMDGIQK |
| | | | HTGMMAENFLYGNEVSYECDQGFYLL |
| | | | GEK |
| | | | ISYYSTPIAVGTVIR |
| | | | MPVCEEIFCPSPPPILNGR |
| | | | PQHQFVRPDVNSSCGEGYK |
| | | | THSAYSHNDIVYVDCNPGFIMNGSR |
| | | | TPNGNHTGGNIAR |
| | | | YSSCPEPIVPGGYK |
| P02741 | CRP | C-reactive protein | DIGYSFTVGGSEILFEVPEVTVAPVHICT |
| | | | SWESASGIVE |
| | | | FWVDGK |
| | | | ESDTSYVSLK |
| | | | GYSIFSYATK |
| | | | GYSIFSYATKR |
| | | | QDNEILIFWSK |
| | | | RQDNEILIFWSK |
| | | | YEVQGEVFTK |
| | | | YEVQGEVFTKPQLWP |
| Q9NQ79 | CRTAC1 | Cartilage acidic protein 1 | DEASSVEVTWPDGK |
| | | | EHGDPLIEELNPGDALEPEGR |
| | | | GDGTFVDAAASAGVDDPHQHGR |
| | | | GNQGFNNNWLR |
| | | | GTGGVVTDFDGDGMLDLILSHGESMA |
| | | | QPLSVFR |
| | | | GVSVGPILSSSASDIFCDNENGPNFLFH |
| | | | NR |
| | | | IIDGGSGYLCEMEPVAHFGLGK |
| | | | LVNIAVDER |
| | | | NVASGEMNSVLEILYPR |
| | | | QGNAIGVTACDIDGDGR |
| | | | TVITADFDNDQELEIFFNNIAYR |
| | | | VDIVYGNWNGPHR |
| | | | WEDILSDEVNVAR |
| | | | YSIYIANYAYGNVGPDALIEMDPEASDL |
| | | | SR |
| P01034 | CST3 | Cystatin-C | AFCSFQIYAVPWQGTMTLSK |
| | | | ALDFAVGEYNK |
| | | | LVGGPMDASVEEEGVRR |
| | | | QIVAGVNYFLDVELGR |
| | | | TQPNLDNCPFHDQPHLK |
| Q01459 | CTBS | Di-N-acetylchitobiase | DIIDPAFR |
| | | | DPAGHFHQVWYDNPQSISLK |
| | | | EIEGSQVTFDVAWSPKNIDR |
| | | | GIGMWNANCLDYSGDAVAK |
| | | | HHPDFEVFVFDVGQK |
| | | | LVMGVPWYGYDYTCLNLSEDHVCTIAK |
| | | | QINSSISGNLWDK |
| | | | QINSSISGNLWDKDQR |
| | | | SYDWSQITTVATFGK |
| | | | TQYMDGINIDIEQEVNCLSPEYDALTAL |
| | | | VK |
| P53634 | CTSC | Dipeptidyl peptidase 1 | ILHLPTSWDWR |
| | | | ILTNNSQTPILSPQEVVSCSQYAQGCE |
| | | | GGFPYLIAGK |
| | | | SWTATTYMEYETLTLGDMIR |
| | | | VTTYCNETMTGWVHDVLGR |
| | | | YAQDFGLVEEACFPYTGTDSPCK |
| | | | YYSSEYHYVGGFYGGCNEALMK |
| Q9UBX1 | CTSF | Cathepsin F | NFVITYNR |
| | | | NLGGLETEDDYSYQGHMQSCNFSAEK |
| | | | PLRPLCSPWLIDHAVLLVGYGNR |
| | | | SAFTQGSAMISSLSQNHPDNRNETFSS |
| | | | VISLLNEDPLSQDLPVK |
| | | | VYINDSVELSQNEQK |
| Q9UBR2 | CTSZ | Cathepsin Z | DQECDKFNQCGTCNEFK |
| | | | GAWPSTLLSVQNVIDCGNAGSCEGGN |
| | | | DLSVWDYAHQHGIP |
| | | | DETCNNYQAK |
| | | | LANYTGGIYAEYQDTTYINHVVSVAGW |
| | | | GISDGTEYWIVR |
| | | | NQHIPQYCGSCWAHASTSAMADR |
| | | | NVDGVNYASITR |
| | | | PHEYLSPADLPK |
| | | | STYPRPHEYLSPADLPK |
| | | | YNLAIEEHCTFGDPIV |
| Q14118 | DAG1 | Dystroglycan | EALPSWLHWDSQSHTLEGLPLDTDK |
| | | | EGAMSAQLGYPVVGWHIANK |
| | | | EGAMSAQLGYPVVGWHIANKK |
| | | | LFDMSAFMAGPGNAK |
| | | | LGANGSHIPQTSSVFSIEVYPEDHSELQ |
| | | | SVR |
| | | | LGCSLNQNSVPDIHGVEAPAR |
| | | | LVPVVNNR |
| | | | NCSTITLQNITR |
| | | | TASPDPGEVVSSACAADEPVTVLTVILD |
| | | | ADLTK |
| | | | VDAWVGTYFEVK |
| | | | VTIPTDLIASSGDIIK |
| | | | VVENGALLSWK |
| P27487 | DPP4 | Dipeptidyl peptidase 4 | FFVVNTDSLSSVTNATSIQITAPASMLIG |
| | | | DHYLCDVTWAT |
| | | | QER |
| | | | FRPSEPHFTLDGNSFYK |
| | | | GTWEVIGIEALTSDYLYYISNEYK |
| | | | HSYTASYDIYDLNK |
| | | | IPNNTQWVTWSPVGHK |
| | | | IQNYSVMDICDYDESSGR |
| | | | ISLQWLR |
| | | | KLDFIILNETK |
| | | | LAYVWNNDIYVK |
| | | | LDFIILNETK |
| | | | LGTFEVEDQIEAAR |
| | | | LNWATYLASTENIIVASFDGR |
| | | | RIQNYSVMDICDYDESSGR |
| | | | TYTLTDYLK |
| | | | VTCLSCELNPER |
| | | | WNCLVARQHIEMSTTGWVGR |
| | | | YMGLPTPEDNLDHYR |
| | | | YMGLPTPEDNLDHYRNSTVMSR |
| Q02487 | DSC2 | Desmocollin-2 | ANYTILK |
| | | | EQYESFEIIAFATTPDGYTPELPLPLIIK |
| | | | LSYQNDPPFGSYVVPITVR |
| | | | LTDPTGWVTIDENTGSIK |
| | | | NGIYNITVLASDQGGR |
| | | | QQMILQIGVVNEAPFSR |
| | | | SFTILLSNTENQEK |
| | | | TCTGTLGIILQDVNDNSPFIPK |
| | | | TNEGVLCVVKPLNYEEK |
| | | | TSYVTSVEENTVDVEILR |
| | | | TVIICKPTMSSAEIVAVDPDEPIHGPPFD |
| | | | FSLESSTSEVQR |
| | | | VTVEDKDLVNTANWR |
| | | | YTYSEWHSFTQPR |
| Q03001 | DST | Dystonin | ACSTSEMMEEKPHILGDIK |
| | | | AGNDLIESSAGEEASNLQNK |
| | | | AIEIELAK |
| | | | CANGLGNDNSSNTLNTDYSFLEINNK |
| | | | DYELQTMTYRAMVDSQQKSPVK |
| | | | EVQIPELSQVFVEDVK |
| | | | ENLLNHEMVLK |
| | | | IDQILESLER |
| | | | LEMSAVADIFDR |
| | | | LESGVQFQNEAEIAGYILECENLLR |
| | | | NIQNFPSDLIENPIMKSK |
| | | | QNVDQALLNGLELLK |
| | | | SAETNIDQDINNLK |
| | | | SELNVVLQNMNQVYSMSSTYIDK |
| | | | SFSDWVSEK |
| | | | SPVQFENLEEIFDTSVSK |
| | | | STVMVRVGGGWMALDEFLVK |
| | | | SVVSWHYLINEIDRIR |
| | | | VAQALCEDLSALVK |
| | | | VNNSGISLCNLISAVTTPAK |
| Q16610 | ECM1 | Extracellular matrix | ACPSHQPDISSGLELPFPPGVPTLDNIK |
| | | protein 1 | APYPNYDR |
| | | | AWEDTLDK |
| | | | AWEDTLDKYCDR |
| | | | CCDLPFPEQACCAEEEK |
| | | | DILTIDIGR |
| | | | DPALCCYLSPGDEQVNCFNINYLR |
| | | | ELLALIQLER |
| | | | ELPSLQHPNEQK |
| | | | EVGPPLPQEAVPLQK |
| | | | FCEAEFSVK |
| | | | FSCFQEEAPQPHYQLR |
| | | | GQGEQGSTGGTNISSTSEPK |
| | | | HIPGLIHNMTAR |
| | | | HKHIPGLIHNMTAR |
| | | | LDGFPPGRPSPDNLNQICLPNR |
| | | | LLPAQLPAEK |
| | | | LTFINDLCGPR |
| | | | LVWEEAMSR |
| | | | NLPATDPLQR |
| | | | NVALVSGDTENAK |
| | | | PSPDNLNQICLPNR |
| | | | QGETLNFLEIGYSR |
| | | | QGNNHTCTWK |
| | | | QHVVYGPWNLPQSSYSHLTR |
| | | | SLPMDHPDSSQHGPPFEGQSGK |
| | | | SLPMDHPDSSQHGPPFEGQSQVQPPP |
| | | | SQEATPLQQEK |
| Q12805 | EFEMP1 | EGF-containing fibulin- | ADQVCINLR |
| | | like extracellular matrix | CVNHYGGYLCLPK |
| | | protein 1 | DIDECDIVPDACK |
| | | | EDEMCWNYHGGFR |
| | | | EHIVDLEMLTVSSIGTFR |
| | | | ELPQSIVYK |
| | | | FSCMCPQGYQVVR |
| | | | GEQCVDIDECTIPPYCHQR |
| | | | GSFACQCPPGYQK |
| | | | IQCAAGYEQSEHNVCQDIDECTAGTHN |
| | | | CR |
| | | | LNCEDIDECR |
| | | | LTIIVGPFSF |
| | | | NPCQDPYILTPENR |
| | | | QTSPVSAMLVLVK |
| | | | RGEQCVDIDECTIPPYCHQR |
| | | | SGNENGEFYLR |
| | | | SVPSDIFQIQATTIYANTINTFR |
| | | | TAQIIVNNEQPQQETQPAEGTSGATTG |
| | | | VVAASSMATSGVL |
| | | | PGGGFVASAAAVAGPEMQTGR |
| | | | TCQDINECETTNECR |
| P98172 | EFNB1 | Ephrin-B1 | HHDYYITSTSNGSLEGLENR |
| | | | KHHDYYITSTSNGSLEGLENR |
| | | | NLEPVSWSSLNPK |
| P08246 | ELANE | Neutrophil elastase | ARPHAWPFMVSLQLR |
| | | | GGCASGLYPDAFAPVAQFVNWIDSIIQR |
| | | | GGHFCGATLIAPNFVMSAAHCVANVN |
| | | | VR |
| | | | GIASVLQELNVTVVTSLCR |
| | | | LGNGVQCLAMGWGLLGR |
| | | | QAGVCFGDSGSPLVCNGLIHGIASFVR |
| | | | VVLGAHNLSR |
| P00748 | F12 | Coagulation factor XII | AEEHTVVLTVTGEPCHFPFQYHR |
| | | | CFEPQLLR |
| | | | CSAPDVHGSSILPGMLCAGFLEGGTDA |
| | | | CQGDSGGPLVCEDQAAER |
| | | | EQPPSLTR |
| | | | GGTCVNMPSGPHCLCPQHLTGNHCQK |
| | | | GRPGPQPWCATTPNFDQDQR |
| | | | LCHCPVGYTGAFCDVDTK |
| | | | LHEAFSPVSYQHDLALLR |
| | | | LHVPLMPAQPAPPK |
| | | | LQEDADGSCALLSPYVQPVCLPSGAAR |
| | | | LSWEYCDLAQCQTPTQAAPPTPVSPR |
| | | | LTLQGIISWGSGCGDR |
| | | | NEIWYR |
| | | | NHSCEPCQTLAVR |
| | | | NKPGVYTDVAYYLAWIR |
| | | | NPDNDIRPWCFVLNR |
| | | | NWGLGGHAFCR |
| | | | PAPEDLTVVLGQER |
| | | | PGPQPWCATTPNFDQDQR |
| | | | PGVYTDVAYYLAWIR |
| | | | PSETTLCQVAGWGHQFEGAEEYASFL |
| | | | QEAQVPFLSLER |
| | | | RLTLQGIISWGSGCGDR |
| | | | TTLSGAPCQPWASEATYR |
| | | | TTLSGAPCQPWASEATYRNVTAEQAR |
| | | | VVGGLVALR |
| | | | WGYCLEPK |
| | | | YKAEEHTVVLTVTGEPCHFPFQYHR |
| P05160 | F13B | Coagulation factor XIII B | CFDHHFLEGSR |
| | | chain | CNEYYLLR |
| | | | CTKPDLSNGYISDVK |
| | | | CPPPPLPINSK |
| | | | DEEVVQCLSDGWSSQPTCR |
| | | | DKVQYECATGYYTAGGK |
| | | | EAYCLDGMWTTPPLCLEPCTLSFTEM |
| | | | EK |
| | | | EHETCLAPELYNGNYSTTQK |
| | | | GDTYPAELYITGSILR |
| | | | GMCTSPPLIK |
| | | | HGEIVHIECELNFEIHGSAEIR |
| | | | HGVIISSTVDTYENGSSVEYR |
| | | | HPPVVMNGAVADGILASYATGSSVEYR |
| | | | IAQYYYTFK |
| | | | KEHETCLAPELYNGNYSTTQK |
| | | | KTEEVECLTYGWSLTPK |
| | | | LIENGYFHPVK |
| | | | LSFFCLAGYTTESGR |
| | | | QEEQTTCTTEGWSPEPR |
| | | | QGYDLSPLTPLSELSVQCNR |
| | | | QSTLSYQEPLR |
| | | | QSTLSYQEPLRT |
| | | | QTYEEGDVVQFFCHENYYLSGSDLIQC |
| | | | YNFGWYPESPVC0 |
| | | | GR |
| | | | SFYFPMSIDK |
| | | | SGYLLHGSNEITCNR |
| | | | TEEVECLTYGWSLTPK |
| | | | TTGGKDEEVVQCLSDGWSSQPTCR |
| | | | VACEEPPFIENGAANLHSK |
| | | | VLHGDLIDFVCK |
| | | | VQYECATGYYTAGGK |
| | | | WDFDNRPHILHGEYIEFICR |
| | | | WSSPPVCLEPCTVNVDYMNR |
| | | | WTLPPECVENNENCK |
| P00734 | F2 | Prothrombin | ANTFLEEVR |
| | | | DKLAACLEGNCAEGLGTNYR |
| | | | DKLAACLEGNCAEGLGTNYRGHVNITR |
| | | | ELLESYIDGR |
| | | | ETAASLLQAGYK |
| | | | ETWTANVGK |
| | | | GDACEGDSGGPFVMK |
| | | | GQPSVLQVVNLPIVER |
| | | | GQPSVLQVVNLPIVERPVCK |
| | | | HQDFNSAVQLVENFCR |
| | | | ITDNMFCAGYK |
| | | | ITDNMFCAGYKPDEGK |
| | | | ITDNMFCAGYKPDEGKR |
| | | | IVEGSDAEIGMSPWQVMLFR |
| | | | KPVAFSDYIHPVCLPDR |
| | | | KPVAFSDYIHPVCLPDRETAASLLQAG |
| | | | YK |
| | | | KSPQELLCGASLISDR |
| | | | LAACLEGNCAEGLGTNYR |
| | | | LAACLEGNCAEGLGTNYRGHVNITR |
| | | | LAVTTHGLPCLAWASAQAK |
| | | | LKKPVAFSDYIHPVCLPDR |
| | | | NFTENDLLVR |
| | | | NPDGDEEGVWCYVAGK |
| | | | NPDSSTTGPWCYTTDPTVR |
| | | | NPDSSTTGPWCYTTDPTVRR |
| | | | PEINSTTHPGADLQENFCR |
| | | | PGDFGYCDLNYCEEAVEEETGDGLDE |
| | | | DSDR |
| | | | PVAFSDYIHPVCLPDR |
| | | | PVAFSDYIHPVCLPDRETAASLLQAGYK |
| | | | QECSIPVCGQDQVTVAMTPR |
| | | | RGDACEGDSGGPFVMK |
| | | | RQECSIPVCGQDQVTVAMTPR |
| | | | SEGSSVNLSPPLEQCVPDR |
| | | | SEGSSVNLSPPLEQCVPDRGQQYQGR |
| | | | SGIECQLWR |
| | | | SPQELLCGASLISDR |
| | | | SPQELLCGASLISDRWVLTAAHCLLYPP |
| | | | WDKNFTENDLLVR |
| | | | SRYPHKPEINSTTHPGADLQENFCR |
| | | | TATSEYQTFFNPR |
| | | | TFGSGEADCGLR |
| | | | TFGSGEADCGLRPLFEK |
| | | | VTGWGNLK |
| | | | VTGWGNLKETWTANVGK |
| | | | WVLTAAHCLLYPPWDK |
| | | | WVLTAAHCLLYPPWDKNFTENDLLVR |
| | | | WYQMGIVSWGEGCDR |
| | | | WYQMGIVSWGEGCDRDGK |
| | | | YGFYTHVFR |
| | | | YPHKPEINSTTHPGADLQENFCR |
| | | | YTACETAR |
| P08709 | F7 | Coagulation factor VII | CHEGYSLLADGVSCTPTVEYPCGK |
| | | | DDQLICVNENGGCEQYCSDHTGTK |
| | | | FSLVSGWGQLLDR |
| | | | GATALELMVLNVPR |
| | | | KVGDSPNITEYMFCAGYSDGSK |
| | | | LHQPVVLTDHVVPLCLPER |
| | | | NCETHKDDQLICVNENGGCEQYCSDH |
| | | | TGTK |
| | | | NLIAVLGEHDLSEHDGDEQSR |
| | | | VAQVIIPSTYVPGTTNHDIALLR |
| | | | VGDSPNITEYMFCAGYSDGSK |
| | | | VSQYIEWLQK |
| P00451 | F8 | Coagulation factor VIII | APCNIQMEDPTFK |
| | | | AWAYFSDVDLEK |
| | | | DFPILPGEIFK |
| | | | DFQITASGQYGQWAPK |
| | | | DLASGLIGPLLICYK |
| | | | DLNSGLIGALLVCR |
| | | | EAIQHESGILGPLLYGEVGDTLLIIFK |
| | | | ENGPMASDPLCLTYSYLSHVDLVK |
| | | | EWLQVDFQK |
| | | | FDDDNSPSFIQIR |
| | | | FHAINGYIMDTLPGLVMAQDQRIR |
| | | | GELNEHLGLLGPYIR |
| | | | GNSTGTLMVFFGNVDSSGIK |
| | | | HNIFNPPIIAR |
| | | | IHPQSWVHQIALR |
| | | | IQNVSSSDLLMLLR |
| | | | ISPNTSQQNFVTQR |
| | | | LHPTHYSIR |
| | | | LLESGLMNSQESSWGKNVSSTESGR |
| | | | MALYNLYPGVFETVEMLPSK |
| | | | MELMGCDLNSCSMPLGMESK |
| | | | NLFLLSTR |
| | | | NLFLTNLDNLHENNTHNQEK |
| | | | NMASHPVSLHAVGVSYWK |
| | | | PYSFYSSLISYEEDQR |
| | | | QFNATTIPENDIEK |
| | | | SFPFNTSVVYK |
| | | | SSPLTESGGPLSLSEENNDSK |
| | | | TLFVEFTDHLFNIAK |
| | | | TWVHYIAAEEEDWDYAPLVLAPDDR |
| | | | VDLLAPMIIHGIK |
| | | | VENTVLPK |
| | | | VLFQDNSSHLPAASYR |
| | | | VVFQEFTDGSFTQPLYR |
| | | | YETFSDDPSPGAIDSNNSLSEMTHFR |
| P98095 | FBLN2 | Fibulin-2 | DVDECALGTHNCSEAETCHNIQGSFR |
| | | | EGETCGAEDNDSCGISLYK |
| | | | HYEDPYSYDQEVAEVEAATALGGEVQ |
| | | | AGAVQAGAGGPPAA |
| | | | LGGGSQPLSTIQAPPWPAVLPR |
| | | | KPQVLPHSHVEEDTDPNSVHSIPR |
| | | | PSPHNILSTSLPDAAWIPPTR |
| Q9Y6R7 | FCGBP | IgGFc-binding protein | AGCVAESTAVCR |
| | | | AIGYATAADCGR |
| | | | AISGLTIDGHAVGAK |
| | | | ALASYVAACQAAGVVIEDWR |
| | | | APGWDPLCWDECR |
| | | | ASQHGSDVVIETDFGLR |
| | | | AVGGKPAGWQVGGAQGCGECVSK |
| | | | CGPGGGSLVCTPASCGLGEVCGLLPS |
| | | | GQHGCQPVSTAECQ |
| | | | AWGDPHYVTLDGHR |
| | | | CLANGGIHYITLDGR |
| | | | CLLPGQSGPLCDALATYAAACQAAGAT |
| | | | VHPWR |
| | | | CPGLQNTIPWYR |
| | | | CSCSSSSGLTCQAAGCPPGR |
| | | | CSVQNGLLGCYPDR |
| | | | CVPLNNGCGCWANGTYHEAGSEFWA |
| | | | DGTCSQWCR |
| | | | EEFCGLLSSPTGPLSSCHK |
| | | | EGCVCDAGFVLSGDTCVPVGQCGCLH |
| | | | DDR |
| | | | EGCVCDAGFVLSGDTCVPVGQCGCLH |
| | | | DGR |
| | | | EQGGQGVCLPNYEATCWLWGDPHYH |
| | | | SFDGR |
| | | | EYPGQVLVDDVLQYLPFQAADGQVQV |
| | | | FR |
| | | | FAVLQENVAWGNGR |
| | | | FAVLQENVAWGNGRVSVTR |
| | | | FDFMGTCTYLLVGSCGQNAALPAFR |
| | | | FDFMGTCVYVLAQTCGTR |
| | | | FDFMGTCVYVLAQTCGTRPGLHR |
| | | | FDFQGTCEYLLSAPCHGPPLGAENFTV |
| | | | TVANEHR |
| | | | FGTCQGSGDPHYVSFDGR |
| | | | FLLSQGVCIPVQDCGCTHNGR |
| | | | FNFQGTCEYLLSAPCHGPPLGAENFTV |
| | | | TVANEHR |
| | | | FQDQVCGLCGNYNGDPADDFLTPDGA |
| | | | LAPDAVEFASSWK |
| | | | GATTSPGVYELSSR |
| | | | GCGEGCGPQGCPVCLAEETAPYESNE |
| | | | ACGQLR |
| | | | GCVLDVCMGGGDR |
| | | | GCVLDVCMGGGDRDILCK |
| | | | GEVGFVLVDNQR |
| | | | GGGQAANALAFGNSWQEETRPGCGA |
| | | | TEPGDCPK |
| | | | GLCVLSVGANLTTFDGAR |
| | | | GLQAGDVVEFEVR |
| | | | GMVCQEHSCKPGQVCQPSGGILSCV |
| | | | TK |
| | | | HTTCNHVVEQLLPTSAWGTHYVVPTLA |
| | | | SQSR |
| | | | IFQHAVVIHSDYAISVQALNAK |
| | | | KVTVRPGESVMVNISAK |
| | | | LCGACGNFDGDQTNDWHDSQEK |
| | | | LCGACGNFDGDQTNDWHDSQEKPAM |
| | | | EK |
| | | | LCGLCGNFNGNWSDDFVLPNGSAASS |
| | | | VETFGAAWR |
| | | | LDDGDYLCEDGCQNNCPACTPGQAQH |
| | | | YEGDR |
| | | | LDGPFAVCHDTLDPR |
| | | | LDGPFAVCHDTLDPRPFLEQCVYDLCV |
| | | | VGGER |
| | | | LDSLVAQQLQSK |
| | | | LDSLVAQQLQSKNECGILADPK |
| | | | LEQYEGPGFCGPLAPGTGGPFTTCHA |
| | | | HVPPESFFK |
| | | | LLFDGDAHLLMSIPSPFR |
| | | | LLISSLSESPASVSILSQADNTSK |
| | | | LLISSLSESPASVSILSQADNTSKK |
| | | | LLVTVAGQVVSLAQGQQVTVDGEAVAL |
| | | | PVAVGR |
| | | | LPVSLSEGR |
| | | | LPVVLANGQIR |
| | | | LRVPAAYAGSLCGLCGNYNQDPADD |
| | | | LK |
| | | | LTWEAVPGSEFSYAEVELGTADMIHTA |
| | | | EATTNLGLLTFGLAK |
| | | | LVDPQGPLK |
| | | | NEVTYDPYLVLIPDVAAYCPAYVVK |
| | | | NPNNDQVFPNGTLAPSIPIWGGSWR |
| | | | NPQGPFATCQAVLSPSEYFR |
| | | | PAGWQVGGAQGCGECVSK |
| | | | PDTAELTLLRPIQALGTEYFVLTPPGTS |
| | | | AR |
| | | | PFLEQCVYDLCVVGGER |
| | | | PGDEDFSIVLEK |
| | | | PGESVMVNISAK |
| | | | PGQVCQPSGGILSCVNK |
| | | | PGQVCQPSGGILSCVTK |
| | | | PIQALGTEYFVLTPPGTSAR |
| | | | PSGGSLGCVAVGSTTCQASGDPHYTT |
| | | | FDGHR |
| | | | PSGGSLGCVAVGSTTCQASGDPHYTT |
| | | | FDGR |
| | | | SLAAYTAACQAAGVAVK |
| | | | SLAAYTAACQAAGVAVKPWR |
| | | | SPANCPLSCPANSR |
| | | | SVPGCEGVALVVAQTK |
| | | | SVTLQIYNHSLTLSAR |
| | | | TCQGSCAALSGLTGCTTR |
| | | | TDFGLTVTYDWNAR |
| | | | TDSFCPLHCPAHSHYSICTR |
| | | | TEAVGQVHIFFQDGMVTLTPNK |
| | | | TPDGSLLVR |
| | | | TVLSPVEPSCEGMQCAAGQR |
| | | | VAYDLVYYVR |
| | | | VDVTLPSSYHGAVCGLCGNMDR |
| | | | VITVQVANFTLR |
| | | | VNGVLTALPVSVADGR |
| | | | VPAAYAASLCGLCGNYNQDPADDLK |
| | | | VPAAYAGSLCGLCGNYNQDPADDLK |
| | | | VPSSYAEALCGLCGNFNGDPADDLALR |
| | | | VRVNGVLTALPVSVADGR |
| | | | VSYVGLVTVR |
| | | | VTASSPVAVLSGHSCAQK |
| | | | VTLQPYNVAQLQSSVDLSGSK |
| | | | VTVNGVDMK |
| | | | VTVNGVDMKLPVVLANGQIR |
| | | | VTVPGNYYQLMCGLCGNYNGDPK |
| | | | VTVPGNYYQQMCGLCGNYNGDPK |
| | | | VTVRPGESVMVNISAK |
| | | | WVAEVQICHGK |
| | | | VVTVAALGTNISIHK |
| | | | VVTVAALGTNISIHKDEIGK |
| | | | VVTVAALGTNISIHKDEIGKVR |
| | | | VVVCQEHSCKPGQVCQPSGGILSCV |
| | | | NK |
| | | | VVVCQEHSCKPGQVCQPSGGILSCVN |
| | | | KDPCHGVTCR |
| | | | VVVCQEHSCKPGQVCQPSGGILSCVTK |
| | | | VYDLHGSCSYVLAQVCHPK |
| | | | VYDLHGSCSYVLAQVCHPKPGDEDFSI |
| | | | VLEK |
| | | | YDLAFVVASQATK |
| | | | YELCGPACPTSCNGAAAPSNCSGR |
| | | | YLPVNSSLLTSDCSER |
| | | | YQKEEFCGLLSSPTGPLSSCHK |
| | | | YYPLGEVFYPGPECER |
| | | | YYPLGQTFYPGPGCDSLCR |
| P08637 | FCGR3A | Low affinity | AVVFLEPQWYR |
| | | immunoglobulin gamma | CQTNLSTLSDPVQLEVHIGWLLLQAPR |
| | | Fc region receptor III-A | YFHHNSDFYIPK |
| Q9UGM5 | FETUB | Fetuin-B | AIFYMNNPSR |
| | | | ASSQWVVGPSYFVEYLIK |
| | | | GCNDSDVLAVAGFALR |
| | | | GGLGSLFYLTLDVLETDCHVLR |
| | | | GPQEAFPVHLDLTTNPQGETLDISFLFL |
| | | | EPMEEK |
| | | | GSVQYLPDLDDK |
| | | | GSVQYLPDLDDKNSQEK |
| | | | IFFESVYGQCK |
| | | | IYMTCPDCPSSIPTDSSNHQVLEAATES |
| | | | LAK |
| | | | LVVLPFPK |
| | | | PTNLPKVEESQQK |
| | | | SQASSCSLQSSDSVPVGLCK |
| | | | TAECPGPAQNASPLVLPP |
| | | | VLYLAAYNCTLR |
| | | | VLYLAAYNCTLRPVSK |
| P11362 | FGFR1 | Fibroblast growth factor | DLAARNVLVTEDNVMK |
| | | receptor 1 | DLSDLISEMEMMKMIGKHK |
| | | | GNYTCIVENEYGSINHTYQLDVVER |
| | | | IGPDNLPYVQILK |
| | | | LSSSGTPMLAGVSEYELPEDPR |
| | | | PILQAGLPANK |
| | | | SPHRPILQAGLPANK |
| | | | TAGVNTTDKEMEVLHLR |
| Q08830 | FGL1 | Fibrinogen-like protein 1 | DHDNYEGNCAEEDQSGWWFNR |
| | | | DYENGFGNFVQK |
| | | | IDLADFEK |
| | | | IKPLQSPAEFSVYCDMSDGGGWTVIQR |
| | | | NFYELNIGEYSGTAGDSLAGNFHPEVQ |
| | | | WWASHQR |
| | | | NLHFLTTQEDYTLK |
| | | | QLLQENEVQFLDK |
| | | | QYADCSEIFNDGYK |
| | | | VFSFILVTTALTMGR |
| Q14314 | FGL2 | Fibroleukin | LDGSTNFTR |
| | | | LHVGNYNGTAGDALR |
| | | | LNLVNMNNIENYVDSK |
| | | | VANLTFVVNSLDGK |
| P02751 | FN1 | Fibronectin | AAVYQPQPHPQPPPYGHCVTDSGVVY |
| | | | SVGMQWLK |
| | | | ATGVFTTLQPGSSIPPYNTEVTETTIVIT |
| | | | WTPAPR |
| | | | ATITGYR |
| | | | CDPVDQCQDSETGTFYQIGDSWEK |
| | | | CFDHAAGTSYVVGETWEK |
| | | | CFDHAAGTSYVVGETWEKPYQGWMM |
| | | | VDCTCLGEGSGR |
| | | | CHEGGQSYK |
| | | | CNDQDTR |
| | | | DDKESVPISDTIIPAVPPPTDLR |
| | | | DDKESVPISDTIIPEVPQLTDLSFVDITD |
| | | | SSIGLR |
| | | | DLEVVAATPTSLLISWDAPAVTVR |
| | | | DLQFVEVTDVK |
| | | | DQCIVDDITYNVNDTFHK |
| | | | DQCIVDDITYNVNDTFHKR |
| | | | DSMIWDCTCIGAGR |
| | | | DTLTSRPAQGVVTTLENVSPPR |
| | | | EATIPGHLNSYTIK |
| | | | EDVDYHLYPHGPGLNPNASTGQEALS |
| | | | QTTISWAPFQDTSE |
| | | | YIISCHPVGTDEEPLQFR |
| | | | EESPLLIGQQSTVSDVPR |
| | | | EEVVTVGNSVNEGLNQPTDDSCFDPYT |
| | | | VSHYAVGDEWER |
| | | | EINLAPDSSSVVVSGLMVATK |
| | | | ESKPLTAQQTTKLDAPTNLQFVNETDS |
| | | | TVLVR |
| | | | ESVPISDTIIPAVPPPTDLR |
| | | | ESVPISDTIIPEVPQLTDLSFVDITDSSIG |
| | | | LR |
| | | | EVTSDSGSIVVSGLTPGVEYVYTIQVLR |
| | | | EYLGAICSCTCFGGQR |
| | | | FDFTTTSTSTPVTSNTVTGETTPFSPLV |
| | | | ATSESVTEITAS |
| | | | SFVVSWVSASDTVSGFR |
| | | | FGFCPMAAHEEICTTNEGVMYR |
| | | | FLATTPNSLLVSWQPPR |
| | | | FTNIGPDTMR |
| | | | FTQVTPTSLSAQWTPPNVQLTGYR |
| | | | GDSPASSKPISINYR |
| | | | GEWTCIAYSQLR |
| | | | GEWTCKPIAEK |
| | | | GFNCESKPEAEETCFDK |
| | | | GFNCESKPEAEETCFDKYTGNTYR |
| | | | GGNSNGALCHFPFLYNNHNYTDCTSE |
| | | | GR |
| | | | GGNSNGALCHFPFLYNNHNYTDCTSE |
| | | | GRR |
| | | | GIGEWHCQPLQTYPSSSGPVEVFITET |
| | | | PSQPNSHPIQWNA |
| | | | PQPSHISK |
| | | | GLAFTDVDVDSIK |
| | | | GLKPGVVYEGQLISIQQYGHQEVTR |
| | | | GNLLQCICTGNGR |
| | | | GNQESPK |
| | | | HEEGHMLNCTCFGQGR |
| | | | HRPRPYPPNVGEEIQIGHIPR |
| | | | HRPRPYPPNVGQEALSQTTISWAPFQD |
| | | | TSEYIISCHPVGT |
| | | | DEEPLQFR |
| | | | HTSVQTTSSGSGPFTDVR |
| | | | HYQINQQWER |
| | | | IGDQWDK |
| | | | IGDTWR |
| | | | IGDTWRRPHETGGYMLECVCLGNGK |
| | | | IGDTWSK |
| | | | ITGYIIK |
| | | | ITGYIIKYEKPGSPPR |
| | | | ITTTPTNGQQGNSLEEVVHADQSSCTF |
| | | | DNLSPGLEYNVSVYTVK |
| | | | ITYGETGGNSPVQEFTVPGSK |
| | | | IVYSPSVEGSSTELNLPETANSVTLSDL |
| | | | QPGVQYNITIYA |
| | | | VEENQESTPVVIQQETTGTPR |
| | | | IYLYTLNDNAR |
| | | | KTDELPQLVTLPHPNLHGPEILDVPSTV |
| | | | QK |
| | | | KTGQEALSQTTISWAPFQDTSEYIISCH |
| | | | PVGTDEEPLQFR |
| | | | LDAPTNLQFVNETDSTVLVR |
| | | | LGVRPSQGGEAPR |
| | | | LLCQCLGFGSGHFR |
| | | | NEEDVAELSISPSDNAVVLTNLLPGTEY |
| | | | VVSVSSVYEQHESTPLR |
| | | | NLQPASEYTVSLVAIK |
| | | | NLQPASEYTVSLVAIKGNQESPK |
| | | | NSITLTNLTPGTEYVVSIVALNGR |
| | | | NSITLTNLTPGTEYVVSIVALNGREESPL |
| | | | LIGQQSTVSDVPR |
| | | | NTFAEVTGLSPGVTYYFK |
| | | | NTFAEVTGLSPGVTYYFKVFAVSHGR |
| | | | PAQGVVTTLENVSPPR |
| | | | PAQGVVTTLENVSPPRR |
| | | | PGGEPSPEGTTGQSYNQYSQR |
| | | | PGVTEATITGLEPGTEYTIYVIALK |
| | | | PGVVYEGQLISIQQYGHQEVTR |
| | | | PISINYR |
| | | | PLTAQQTTK |
| | | | PQAPITGYR |
| | | | PRPGVTEATITGLEPGTEYTIYVIALK |
| | | | PRPYPPNVGQEALSQTTISWAPFQDTS |
| | | | EYIISCHPVGTDEEPLQFR |
| | | | PSQMQVTDVQDNSISVK |
| | | | PYPPNVGEEIQIGHIPR |
| | | | PYPPNVGQEALSQTTISWAPFQDTSEYI |
| | | | ISCHPVGTDEEPLQFR |
| | | | PYQGWMMVDCTCLGEGSGR |
| | | | QAQQMVQPQSPVAVSQSK |
| | | | QAQQMVQPQSPVAVSQSKPGCYDN |
| | | | GK |
| | | | QDGHLWCSTTSNYEQDQK |
| | | | QKTGLDSPTGIDFSDITANSFTVHWIA |
| | | | PR |
| | | | QYNVGPSVSK |
| | | | RHEEGHMLNCTCFGQGR |
| | | | RPGGEPSPEGTTGQSYNQYSQR |
| | | | RPHETGGYMLECVCLGNGK |
| | | | SDTVPSPR |
| | | | SEPLIGR |
| | | | SSPVVIDASTAIDAPSNLR |
| | | | STATISGLK |
| | | | STATISGLKPGVDYTITVYAVTGR |
| | | | STTPDITGYR |
| | | | SYTITGLQPGTDYK |
| | | | TAGPDQTEMTIEGLQPTVEYVVSVYAQ |
| | | | NPSGESQPLVQTA |
| | | | VTNIDRPK |
| | | | TAGPDQTEMTIEGLQPTVEYVVSVYAQ |
| | | | NPSGESQPLVQTA |
| | | | VTTIPAPTDLK |
| | | | TDELPQLVTLPHPNLHGPEILDVPSTV |
| | | | QK |
| | | | TEIDKPSQMQVTDVQDNSISVK |
| | | | TETITGFQVDAVPANGQTPIQR |
| | | | TFYSCTTEGR |
| | | | TGLDSPTGIDFSDITANSFTVHWIAPR |
| | | | TGQEALSQTTISWAPFQDTSEYIISCHP |
| | | | VGTDEEPLQFR |
| | | | TKTETITGFQVDAVPANGQTPIQR |
| | | | TNTNVNCPIECFMPLDVQADR |
| | | | TNTNVNCPIECFMPLDVQADREDSRE |
| | | | TPFVTHPGYDTGNGIQLPGTSGQQPSV |
| | | | GQQMIFEEHGFR |
| | | | TYHVGEQWQK |
| | | | TYLGNALVCTCYGGSR |
| | | | VDVIPVNLPGEHGQR |
| | | | VEYELSEEGDEPQYLDLPSTATSVNIPD |
| | | | LLPGR |
| | | | VEYELSEEGDEPQYLDLPSTATSVNIPD |
| | | | LLPGRK |
| | | | VPGTSTSATLTGLTR |
| | | | VREEVVTVGNSVNEGLNQPTDDSCFD |
| | | | PYTVSHYAVGDEWER |
| | | | VTDATETTITISWR |
| | | | VTIMWTPPESAVTGYR |
| | | | VTIMWTPPESAVTGYRVDVIPVNLPGE |
| | | | HGQR |
| | | | VTWAPPPSIDLTNFLVR |
| | | | VVTPLSPPTNLHLEANPDTGVLTVSW |
| | | | ER |
| | | | WCGTTQNYDADQK |
| | | | WKCDPVDQCQDSETGTFYQIGDSWEK |
| | | | WKEATIPGHLNSYTIK |
| | | | WLPSSSPVTGYR |
| | | | WSRPQAPITGYR |
| | | | WTPLNSSTIIGYR |
| | | | YEVSVYALK |
| | | | YEVSVYALKDTLTSR |
| | | | YIVNVYQISEDGEQSLILSTSQTTAPDAP |
| | | | PDTTVDQVDDTSIVVR |
| | | | YQCYCYGR |
| | | | YSFCTDHTVLVQTR |
| | | | YSPVKNEEDVAELSISPSDNAVVLTNLL |
| | | | PGTEYVVSVSSV |
| | | | YEQHESTPLR |
| Q12841 | FSTL1 | Follistatin-related protein | CALEDETYADGAETEVDCNR |
| | | 1 | FVEQNETAINITTYPDQENNK |
| | | | GLCVDALIELSDENADWK |
| | | | GSNYSEILDK |
| | | | IIQWLEAEIIPDGWFSK |
| | | | LDSSEFLK |
| | | | LSFQEFLK |
| O95633 | FSTL3 | Follistatin-related protein | AAPCPVPSSPGQELCGNNNVTYISSCH |
| | | 3 | MR |
| | | | AECCASGNIDTAWSNLTHPGNK |
| | | | INLLGFLGLVHCLPCK |
| | | | PQSCVVDQTGSAHCVVCR |
| Q99988 | GDF15 | Growth/differentiation | ANQSWEDSNTDLVPAPAVR |
| | | factor 15 | ASLEDLGWADWVLSPR |
| | | | LRANQSWEDSNTDLVPAPAVR |
| O00451 | GFRA2 | GDNF family receptor | ILANVFCLFFFLGTGADPVVSAK |
| | | alpha-2 | NAIQAFGNGTDVNVSPK |
| Q9UJJ9 | GNPTG | N-acetylglucosamine-1- | CFSLVESTYK |
| | | phosphotransferase | DPSPVSGPVHLFR |
| | | subunit gamma | QWDQVEQDLADELITPQGHEK |
| | | | TLFEDAGYLK |
| | | | TPEENEPTQLEGGPDSLGFETLENCR |
| | | | VVEEPNAFGVNNPFLPQASR |
| | | | WNAYSGILGIWHEWEIANNTFTGM |
| | | | WMR |
| | | | YEFCPFHNVTQHEQTFR |
| Q8NBJ4 | GOLM1 | Golgi membrane protein | AVLVNNITTGER |
| | | 1 | DQLVIPDGQEEEQEAAGEGR |
| | | | DTINLLDQR |
| | | | EETNEIQVVNEEPQR |
| | | | FSYDLSQCINQMK |
| | | | IQSSHNFQLESVNK |
| | | | LQQDVLQFQK |
| | | | LQQDVLQFQKNQTNLER |
| | | | NIDVFNVEDQK |
| | | | NIDVFNVEDQKR |
| | | | QVEKEETNEIQVVNEEPQR |
| P80108 | GPLD1 | Phosphatidylinositol- | ALEFLQLHNGR |
| | | glycan-specific | AQYVLISPEASSR |
| | | phospholipase D | DLLGIYEK |
| | | | ELLLEHQDAYQAGIVFPDCFYPSICK |
| | | | ENYPLPWEK |
| | | | FGGVLHLSDLDDDGLDEIIMAAPLR |
| | | | FGSALAVLDFNVDGVPDLAVGAPSVGS |
| | | | EQLTYK |
| | | | FGSSLITVR |
| | | | FHDVSESTHWTPFLNASVHYIR |
| | | | GAVYVYFGSK |
| | | | GEEDFSWFGYSLHGVTVDNR |
| | | | GIVAAFYSGPSLSDK |
| | | | GIVAAFYSGPSLSDKEK |
| | | | GVFFSVNSWTPDSMSFIYK |
| | | | HVSSPLASYFLSFPYAR |
| | | | IADVTSGLIGGEDGR |
| | | | ILEGFQPSGR |
| | | | LGTSLSSGHVLMNGTLK |
| | | | LGWAMTSADLNQDGHGDLVVGAPG |
| | | | YSR |
| | | | LNVEAANWTVR |
| | | | LSGALHVYSLGSD |
| | | | NLTTSLTESVDR |
| | | | NQVVIAAGR |
| | | | QGGMSSSPNITISCQDIYCNLGWTLLAA |
| | | | DVNGDSEPDLVIGSPFAPGGGK |
| | | | QVLLVGAPTYDDVSK |
| | | | SWITPCPEEK |
| | | | TLLLVGSPTWK |
| | | | TMFIGGSQLSQK |
| | | | VAFLTVTLHQGGATR |
| | | | VITENVIVDCSHIQFLEMYGEMLAVSK |
| | | | VYLIYGNDLGLPPVDLDLDK |
| | | | VYLIYGNDLGLPPVDLDLDKEAHR |
| Q04756 | HGFAC | Hepatocyte growth factor | CFLGNGTGYR |
| | | activator | CQIAGWGHLDENVSGYSSSLR |
| | | | CSSPEVYGADISPNMLCAGYFDCK |
| | | | DSALSWEYCR |
| | | | DSVSVVLGQHFFNR |
| | | | EALVPLVADHK |
| | | | GVASTSASGLSCLAWNSDLLYQELHVD |
| | | | SVGAAALLGLGPHAYCR |
| | | | LEACESLTR |
| | | | NGVAYLYGIISWGDGCGR |
| | | | NPDNDERPWCYVVK |
| | | | SDACQGDSGGPLACEK |
| | | | SQFVQPICLPEPGSTFPAGHK |
| | | | TTDVTQTFGIEK |
| | | | VANYVDWINDR |
| | | | VQLSPDLLATLPEPASPGR |
| | | | YEYLEGGDR |
| | | | YIPYTLYSVFNPSDHDLVLIR |
| Q29960 | HLA-C | HLA class I | APWVEQEGPEYWDR |
| | | histocompatibility antigen, | GYYNQSEAGSHTLQWMYGCDLGP |
| | | Cw-16 alpha chain | DGR |
| | | | YTCHVQHEGLPEPLTLR |
| P00738 | HP | Haptoglobin | AVGDKLPECEADDGCPKPPEIAHGYVE |
| | | | HSVR |
| | | | DYAEVGR |
| | | | FTDHLK |
| | | | FTDHLKYVMLPVADQDQCIR |
| | | | HYEGSTVPEK |
| | | | HYEGSTVPEKK |
| | | | KQLVEIEKVVLHPNYSQVDIGLIK |
| | | | KTPKSPVGVQPILNEHTFCAGMSK |
| | | | LPECEADDGCPKPPEIAHGYVEHSVR |
| | | | LRTEGDGVYTLNNEK |
| | | | LRTEGDGVYTLNNEKQWINK |
| | | | QLVEIEKVVLHPNYSQVDIGLIK |
| | | | SCAVAEYGVYVKVTSIQDWVQK |
| | | | SPVGVQPILNEHTFCAGMSK |
| | | | SPVGVQPILNEHTFCAGMSKYQEDTCY |
| | | | GDAGSAFAVHDLEEDTWYATGILSFDK |
| | | | TEGDGVYTLNNEK |
| | | | TEGDGVYTLNNEKQWINK |
| | | | TPKSPVGVQPILNEHTFCAGMSK |
| | | | VGYVSGWGR |
| | | | VGYVSGWGRNANFK |
| | | | VMPICLPSKDYAEVGR |
| | | | VTSIQDWVQK |
| | | | VTSIQDWVQKTIAEN |
| | | | VVLHPNYSQVDIGLIK |
| | | | VVLHPNYSQVDIGLIKLK |
| | | | YQEDTCYGDAGSAFAVHDLEEDTWYA |
| | | | TGILSFDK |
| | | | YQEDTCYGDAGSAFAVHDLEEDTWYA |
| | | | TGILSFDKSCAVAEYGVYVK |
| | | | YVMLPVADQDQCIR |
| | | | YVMLPVADQDQCIRHYEGSTVPEK |
| | | | YVMLPVADQDQCIRHYEGSTVPEKK |
| | | | AVGDKLPECEAVCGK |
| | | | AVGDKLPECEAVCGKPK |
| | | | DIAPTLTLYVGK |
| | | | DIAPTLTLYVGKK |
| | | | DIAPTLTLYVGKKQLVEIEK |
| | | | GSFPWQAK |
| | | | GSFPWQAKMVSHHNLTTGATLINEQW |
| | | | LLTTAK |
| | | | ILGGHLDAK |
| | | | ILGGHLDAKGSFPWQAK |
| | | | KQLVEIEK |
| | | | LPECEAVCGK |
| | | | LRTEGDGVYTLNDK |
| | | | MVSHHNLTTGATLINEQWLLTTAK |
| | | | MVSHHNLTTGATLINEQWLLTTAKNLFL |
| | | | NHSENATAK |
| | | | NLFLNHSENATAK |
| | | | NLFLNHSENATAKDIAPTLTLYVGK |
| | | | NLFLNHSENATAKDIAPTLTLYVGKK |
| | | | QLVEIEK |
| | | | SCAVAEYGVYVK |
| | | | TEGDGVYTLNDK |
| | | | TEGDGVYTLNDKK |
| | | | VMPICLPSK |
| P00739 | HPR | Haptoglobin-related | FPKPPEIANGYVEHLFR |
| | | protein | MSDLGAVISLLLWGR |
| | | | QLFALYSGNDVTDISDDR |
| | | | QLFALYSGNDVTDISDDRFPKPPEIANG |
| | | | YVEHLFR |
| | | | SDLGAVISLLLWGR |
| | | | SPVGVQPILNEHTFCVGMSK |
| | | | VGYVSGWGQSDNFK |
| | | | VMPICLPSKNYAEVGR |
| | | | VTSIQHWVQK |
| | | | VVLHPNYHQVDIGLIK |
| | | | YQEDTCYGDAGSAFAVHDLEEDTWYA |
| | | | AGILSFDK |
| | | | YVMLPVADQYDCITHYEGSTCPK |
| Q9Y251 | HPSE | Heparanase | ADIFINGSQLGEDFIQLHK |
| | | | EDFLNPDVLDIFISSVQK |
| | | | EGDLTLYAINLHNVTK |
| | | | GYNISWELGNEPNSFLK |
| | | | KADIFINGSQLGEDFIQLHK |
| | | | TADLQWNSSNAQLLLDYCSSK |
| P04196 | HRG | Histidine-rich glycoprotein | ADLFYDVEALDLESPK |
| | | | ALDLINK |
| | | | DGYLFQLLR |
| | | | DHHHPHKPHEHGPPPPPDER |
| | | | DHSHGPPLPQGPPPLLPMSCSSCQHA |
| | | | TFGTNGAQR |
| | | | DSPVLIDFFEDTER |
| | | | EENDDFASFR |
| | | | GEVLPLPEANFPSFPLPHHK |
| | | | GGEGTGYFVDFSVR |
| | | | HPLKPDNQPFPQSVSESCPGK |
| | | | HPNVFGFCR |
| | | | HSHESQDLR |
| | | | HSHNNNSSDLHPHK |
| | | | IADAHLDRVENTTVYYLVLDVQESDCSV |
| | | | LSR |
| | | | IADAHLDRVENTTVYYLVLDVQESDCSV |
| | | | LSRK |
| | | | KGEVLPLPEANFPSFPLPHHK |
| | | | KYWNDCEPPDSR |
| | | | NLVINCEVFDPQEHENINGVPPHLGHPF |
| | | | HWGGHER |
| | | | PSEIVIGQCK |
| | | | QIGSVYR |
| | | | RDGYLFQLLR |
| | | | RPSEIVIGQCK |
| | | | SGFPQVSMFFTHTFPK |
| | | | VENTTVYYLVLDVQESDCSVLSR |
| | | | VIDFNCTTSSVSSALANTK |
| | | | VIDFNCTTSSVSSALANTKDSPVLIDFFE |
| | | | DTER |
| | | | VIDFNCTTSSVSSALANTKDSPVLIDFFE |
| | | | DTERYR |
| | | | YKEENDDFASFR |
| | | | YWNDCEPPDSR |
| P14625 | HSP90B1 | Endoplasmin | EEASDYLELDTIK |
| | | | EEEAIQLDGLNASQIR |
| | | | FAFQAEVNR |
| | | | FQSSHHPTDITSLDQYVER |
| | | | GVVDSDDLPLNVSR |
| | | | GYEVIYLTEPVDEYCIQALPEFDGK |
| | | | HNNDTQHIWESDSNEFSVIADPR |
| | | | IKEDEDDKTVLDLAVVLFETATLR |
| | | | LIINSLYK |
| | | | LISLTDENALSGNEELTVK |
| | | | LTESPCALVASQYGWSGNMER |
| | | | NLLHVTDTGVGMTR |
| | | | SILFVPTSAPR |
| | | | TDDEVVQREEEAIQLDGLNASQIR |
| | | | TETVEEPMEEEEAAKEEKEESDDEAAV |
| | | | EEEEEEK |
| | | | VFITDDFHDMMPK |
| | | | YSQFINFPIYVWSSK |
| | | | ELISNASDALDK |
| P11021 | HSPA5 | 78 kDa glucose-regulated | DAGTIAGLNVMR |
| | | protein | DNHLLGTFDLTGIPPAPR |
| | | | ELEEIVQPIISK |
| | | | FEELNMDLFR |
| | | | GINPDEAVAYGAAVQAGVLSGDQDTG |
| | | | DLVLLDVCPLTLGI |
| | | | ETVGGVMTK |
| | | | IEIESFYEGEDFSETLTR |
| | | | IEWLESHQDADIEDFK |
| | | | IINEPTAAAIAYGLDKR |
| | | | ITPSYVAFTPEGER |
| | | | NELESYAYSLK |
| | | | NILVFDLGGGTFDVSLLTIDNGVFEVVA |
| | | | TNGDTHLGGEDFDQR |
| | | | NQLTSNPENTVFDAK |
| | | | SDIDEIVLVGGSTR |
| | | | SQIFSTASDNQPTVTIK |
| | | | TFAPEEISAMVLTK |
| | | | VLEDSDLKKSDIDEIVLVGGSTR |
| | | | IINEPTAAAIAYGLDK |
| Q9Y4L1 | HYOU1 | Hypoxia up-regulated | AANSLEAFIFETQDK |
| | | protein 1 | AEPPLNASASDQGEK |
| | | | DAVVYPILVEFTR |
| | | | DEPGEQVELK |
| | | | EEAEAPVEDGSQPPPPEPK |
| | | | ENGTDTVQEEEESPAEGSK |
| | | | EVQYLLNK |
| | | | FPEHELTFDPQR |
| | | | LGNTISSLFGGGTTPDAK |
| | | | LGNTISSLFGGGTTPDAKENGTDTVQE |
| | | | EEESPAEGSK |
| | | | LIPEMDQIFTEVEMTTLEK |
| | | | LQDLTLR |
| | | | LSAASTWLEDEGVGATTVMLK |
| | | | LSALDNLLNHSSMFLK |
| | | | LYQPEYQEVSTEEQR |
| | | | LYQPEYQEVSTEEQREEISGK |
| | | | MVEEIGVELVVLDLPDLPEDK |
| | | | SLAEDFAEQPIK |
| | | | VAIVKPGVPMEIVLNK |
| | | | VEFEELCADLFER |
| | | | VFGSQNLTTVK |
| | | | VINETWAWK |
| | | | VINETWAWKNATLAEQAK |
| | | | VIPPAGQTEDAEPISEPEK |
| | | | VLQLINDNTATALSYGVFR |
| | | | VPGPVQQALQSAEMSLDEIEQVILVGG |
| | | | ATR |
| P05362 | ICAM1 | Intercellular adhesion | ANLTVVLLR |
| | | molecule 1 | ASVSVTAEDEGTQR |
| | | | DCPGNWTWPENSQQTPMCQAWGNPL |
| | | | PELK |
| | | | DGTFPLPIGESVTVTR |
| | | | DHHGANFSCRTELDLR |
| | | | DLEGTYLCR |
| | | | EPAVGEPAEVTTTVLVR |
| | | | GGSVLVTCSTSCDQPK |
| | | | KVYELSNVQEDSQPMCYSNCPDGQST |
| | | | AK |
| | | | LLGIETPLPK |
| | | | LNPTVTYGNDSFSAK |
| | | | REPAVGEPAEVTTTVLVR |
| | | | SFSCSATLEVAGQLIHK |
| | | | SFSCSATLEVAGQLIHKNQTR |
| | | | TELDLRPQGLELFENTSAPYQLQTFVLP |
| | | | ATPPQLVSPR |
| | | | TFLTVYWTPER |
| | | | VELAPLPSWQPVGK |
| | | | VTLNGVPAQPLGPR |
| | | | VYELSNVQEDSQPMCYSNCPDGQS |
| | | | TAK |
| O75144 | ICOSLG | ICOS ligand | AMVGSDVELSCACPEGSR |
| | | | FDLNDVYVYWQTSESK |
| | | | GLYDVVSVLR |
| | | | LFNVTPQDEQK |
| | | | PNVYWINK |
| | | | TDNSLLDQALQNDTVFLNMR |
| | | | TPSVNIGCCIENVLLQQNLTVGSQTGN |
| | | | DIGER |
| | | | TVVTYHIPQNSSLENVDSR |
| P35858 | IGFALS | Insulin-like growth factor- | AFWLDVSHNR |
| | | binding protein complex | AGAFLGLTNVAVMNLSGNCLR |
| | | acid labile subunit | ALRDFALQNPSAVPR |
| | | | ANVFVQLPR |
| | | | DFALQNPSAVPR |
| | | | DLHFLEELQLGHNR |
| | | | DLSEAHFAPC |
| | | | DNGLVGIEEQSLWGLAELLELDLTSNQ |
| | | | LTHLPHR |
| | | | ELVLAGNR |
| | | | FVQAICEGDDCQPPAYTYNNITCASPP |
| | | | EVVGLDLR |
| | | | IRPHTFTGLSGLR |
| | | | LAELPADALGPLQR |
| | | | LAYLQPALFSGLAELR |
| | | | LEALPNSLLAPLGR |
| | | | LEDGLFEGLGSLWDLNLGWNSLAVLPD |
| | | | AAFR |
| | | | LEYLLLSR |
| | | | LFQGLGK |
| | | | LHSLHLEGSCLGR |
| | | | LSHNAIASLR |
| | | | LWLEGNPWDCGCPLK |
| | | | NLIAAVAPGAFLGLK |
| | | | NLPEQVFR |
| | | | SFEGLGQLEVLTLDHNQLQEVK |
| | | | SLALGTFAHTPALASLGLSNNR |
| | | | TFTPQPPGLER |
| | | | VAGLLEDTFPGLLGLR |
| | | | WLDLSHNR |
| P18065 | IGFBP2 | Insulin-like growth factor- | CYPHPGSELPLQALVMGEGTCEK |
| | | binding protein 2 | GPLEHLYSLHIPNCDK |
| | | | LAACGPPPVAPPAAVAAVAGGAR |
| | | | LEGEACGVYTPR |
| | | | LIQGAPTIR |
| | | | TPCQQELDQVLER |
| P17936 | IGFBP3 | Insulin-like growth factor- | ALAQCAPPPAVCAELVR |
| | | binding protein 3 | AYLLPAPPAPGNASESEEDR |
| | | | CQPSPDEARPLQALLDGR |
| | | | EPGCGCCLTCALSEGQPCGIYTER |
| | | | FLNVLSPR |
| | | | GFCWCVDK |
| | | | GLCVNASAVSR |
| | | | PLQALLDGR |
| | | | VDYESQSTDTQNFSSESK |
| | | | YGQPLPGYTTK |
| | | | YKVDYESQSTDTQNFSSESK |
| Q16270 | IGFBP7 | Insulin-like growth factor- | AGAAAGGPGVSGVCVCK |
| | | binding protein 7 | EDAGEYECHASNSQGQASASAK |
| | | | GTCEQGPSIVTPPK |
| | | | HEVTGWVLVSPLSK |
| | | | ITVVDALHEIPVK |
| | | | YPVCGSDGTTYPSGCQLR |
| P04438 | IGHV2-70 | Ig heavy chain V-II region | ALEWLAR |
| | | SESS | ATHTLTLTCTFSGLSVNTR |
| | | | ESGPALVK |
| | | | EVMITSNAFDIWGQGTWSPSLQ |
| | | | IDWDDDK |
| | | | QPPGKALEWLAR |
| | | | LLIYDASNLETGVPSR |
| Q14623 | IHH | Indian hedgehog protein | ELTPNYNPDIIFK |
| | | | LALTPAHLLFTADNHTEPAAR |
| | | | LLLEEGSFHPLGMSGAGS |
| | | | VLAMGEDGSPTFSDVLIFLDR |
| O95998 | IL18BP | Interleukin-18-binding | ALVLEQLTPALHSTNFSCVLVDPEQVV |
| | | protein | QR |
| | | | DPCPSQPPVFPAAK |
| | | | FPNFSILYWLGNGSFIEHLPGR |
| | | | HVVLAQLWAGLR |
| | | | QCPALEVTWPEVEVPLNGTLSLSCVAC |
| | | | SR |
| P27930 | IL1R2 | Interleukin-1 receptor | CVLTFAHEGQQYNITR |
| | | type 2 | EETIPVIISPLK |
| | | | GTTHLLVHDVALEDAGYYR |
| | | | LEGEPVALR |
| | | | MWAQDGALWLLPALQEDSGTYVCTTR |
| | | | QEYSENNENYIEVPLIFDPVTR |
| | | | VFLGTGTPLTTMLWWTANDTHIESAYP |
| | | | GGR |
| Q9NPH3 | IL1RAP | Interleukin-1 receptor | CPLFEHFLK |
| | | accessory protein | DLEEPINFR |
| | | | DVLWFR |
| | | | DVLWFRPTLLNDTGNYTCMLR |
| | | | EKDVLWFRPTLLNDTGNYTCMLR |
| | | | FNYSTAHSAGLTLIWYWTR |
| | | | IQNFNNVIPEGMNLSFLIALISNNGNYTC |
| | | | VVTYPENGR |
| | | | ITCPNVDGYFPSSVKPTITWYMGCYK |
| | | | KPDDITIDVTINESISHSR |
| | | | LYIEYGIQR |
| | | | NAVPPVIHSPNDHVVYEK |
| | | | NEVWWTIDGK |
| | | | PTLLNDTGNYTCMLR |
| | | | QDRDLEEPINFR |
| | | | QIQVFEDEPAR |
| | | | SSSDEQGLSYSSLK |
| | | | TQILSIK |
| | | | VAFPLEVVQK |
| Q01638 | IL1RL1 | Interleukin-1 receptor-like | DEQGFSLFPVIGAPAQNEIK |
| | | 1 | EEDLLLQYDCLALNLHGLR |
| | | | FIHNENGANYSVTATR |
| | | | FLPAAVADSGIYTCIVR |
| | | | GTQFLAAVLWQLNGTK |
| | | | IADVKEEDLLLQYDCLALNLHGLR |
| | | | IQQEEGQNQSFSNGLACLDMVLR |
| | | | IYCPTIDLYNWTAPLEWFK |
| | | | NANLTCSACFGK |
| | | | PSYTVDWYYSQTNK |
| | | | QGKPSYTVDWYYSQTNK |
| | | | QSDCNVPDYLMYSTVSGSEK |
| | | | QSWGLENEALIVR |
| | | | TGYANVTIYK |
| | | | VFASGQLLK |
| P18510 | IL1RN | Interleukin-1 receptor | LQLEAVNITDLSENR |
| | | antagonist protein | LQLEAVNITDLSENRK |
| | | | NNQLVAGYLQGPNVNLEEK |
| | | | SDSGPTTSFESAACPGWFLCTAMEAD |
| | | | QPVSLTNMPDEGVMVTK |
| P19827 | ITIH1 | Inter-alpha-trypsin | AAISGENAGLVR |
| | | inhibitor heavy chain H1 | ADVQAHGEGQEFSITCLVDEEEMK |
| | | | ADVQAHGEGQEFSITCLVDEEEMKK |
| | | | ANLSSQALQMSLDYGFVTPLTSMSIR |
| | | | DKICDLLVANNHFAHFFAPQNLTNMNK |
| | | | DPWHGAEVSCWFIHNNGAGLIDGAYT |
| | | | DYIVPDIF |
| | | | EDTLCFNINEEPGVILSLVQDPNTGFSV |
| | | | NGQLIGNK |
| | | | EERANLSSQALQMSLDYGFVTPLTSMS |
| | | | IR |
| | | | ELAAQTIK |
| | | | EQFTIHLTVNPQSK |
| | | | EVAFDLEIPK |
| | | | FAHYVVTSQVVNTANEAR |
| | | | FPLYNLGFGHNVDFNFLEVMSMENN |
| | | | GR |
| | | | GFSLDEATNLNGGLLR |
| | | | GHVLFRPTVSQQQSCPTCSTSLLNG |
| | | | HFK |
| | | | GIEILNQVQESLPELSNHASILIMLTDGD |
| | | | PTEGVTDR |
| | | | GMADQDGLKPTIDKPSEDSPPLEML |
| | | | GPR |
| | | | GRFPLYNLGFGHNVDFNFLEVMSMEN |
| | | | NGR |
| | | | GSLVQASEANLQAAQDFVR |
| | | | GSSVHQDFLGFYVLDSHR |
| | | | ICDLLVANNHFAHFFAPQNLTNMNK |
| | | | ILGDMQPGDYFDLVLFGTR |
| | | | IYEDHDATQQLQGFYSQVAK |
| | | | IYEDHDATQQLQGFYSQVAKPLLVDVD |
| | | | LQYPQDAVLALTQNHHK |
| | | | KGHVLFRPTVSQQQSCPTCSTSLLNGH |
| | | | FK |
| | | | LDAQASFLPK |
| | | | LGIANPATDFQLEVTPQNITLNPGFGGP |
| | | | VFSWR |
| | | | LWAYLTIQELLAK |
| | | | LWAYLTIQELLAKR |
| | | | MDGAMGPRGLLLCMYLVSLLILQAMPA |
| | | | LGSATGR |
| | | | NHMQYEIVIK |
| | | | NVVFVIDISGSMR |
| | | | PLLVDVDLQYPQDAVLALTQNHHK |
| | | | PTVSQQQSCPTCSTSLLNGHFK |
| | | | QAVDTAVDGVFIR |
| | | | QLVHHFEIDVDIFEPQGISK |
| | | | QYYEGSEIVVAGR |
| | | | RNHMQYEIVIK |
| | | | RQAVDTAVDGVFIR |
| | | | TAFISDFAVTADGNAFIGDIK |
| | | | TFVLSALQPSPTHSSSNTQR |
| | | | THGLLGQFFHPIGFEVSDIHPGSDPTKP |
| | | | DATMVVR |
| | | | TMEQFTIHLTVNPQSK |
| | | | VTFQLTYEEVLK |
| | | | VTFQLTYEEVLKR |
| | | | VTGVDTDPHFIIHVPQK |
| | | | VTYDVSR |
| | | | VTYDVSRDKICDLLVANNHFAHFFAPQ |
| | | | NLTNMNK |
| P19823 | ITIH2 | Inter-alpha-trypsin | AEDHFSVIDFNQNIR |
| | | inhibitor heavy chain H2 | AGELEVFNGYFVHFFAPDNLDPIPK |
| | | | AHVSFKPTVAQQR |
| | | | AIFILNEANNLGLLDPNSVSLIILVSDGDP |
| | | | TVGELK |
| | | | ENIQDNISLFSLGMGFDVDYDFLK |
| | | | ENIQDNISLFSLGMGFDVDYDFLKR |
| | | | ETAVDGELVVLYDVK |
| | | | FDPAKLDQIESVITATSANTQLVLETLAQ |
| | | | MDDLQDFLSK |
| | | | FLHVPDTFEGHFDGVPVISK |
| | | | FYNQVSTPLLR |
| | | | GAFISNFSMTVDGK |
| | | | GAFISNFSMTVDGKTFR |
| | | | HADPDFTR |
| | | | HLEVDVWVIEPQGLR |
| | | | IQPSGGTNINEALLR |
| | | | IYGNQDTSSQLK |
| | | | IYLQPGR |
| | | | KFYNQVSTPLLR |
| | | | KLWAYLTINQLLAER |
| | | | LDQIESVITATSANTQLVLETLAQMDDL |
| | | | QDFLSK |
| | | | LDQIESVITATSANTQLVLETLAQMDDL |
| | | | QDFLSKDK |
| | | | LWAYLTINQLLAER |
| | | | MLADAPPQDPSCCSGALYYGSK |
| | | | NDLISATK |
| | | | NILFVIDVSGSMWGVK |
| | | | NVQFNYPHTSVTDVTQNNFHNYFGGS |
| | | | EIVVAGK |
| | | | SILQMSLDHHIVTPLTSLVIENEAGDER |
| | | | SILQMSLDHHIVTPLTSLVIENEAGDER |
| | | | MLADAPPQDPSC |
| | | | CSGALYYGSK |
| | | | SSALDMENFR |
| | | | SSALDMENFRTEVNVLPGAK |
| | | | TEVNVLPGAK |
| | | | TILDDLR |
| | | | TILDDLRAEDHFSVIDFNQNIR |
| | | | TWRNDLISATK |
| | | | VQFELHYQEVK |
| | | | VVNNSPQPQNVVFDVQIPK |
| | | | YIEKIQPSGGTNINEALLR |
| Q06033 | ITIH3 | Inter-alpha-trypsin | ADTAKEVSFDVELPK |
| | | inhibitor heavy chain H3 | ALDLSLK |
| | | | ALQERDYIFGNYIER |
| | | | AVNRADTAKEVSFDVELPK |
| | | | AVPSTFSWLDTVTVTQDGLSMMINR |
| | | | DDALCFNIDEAPGTVLR |
| | | | DFLGFYVVDSHR |
| | | | DYIFGNYIER |
| | | | EHLVQATPENLQEAR |
| | | | ESPGNVQIVNGYFVHFFAPQGLPVVPK |
| | | | EVSFDVELPK |
| | | | FPLYNLGFGNNLNYNFLENMALENHGF |
| | | | AR |
| | | | FTVSVNVAAGSK |
| | | | GHGATNDLTFTEEVDMK |
| | | | GHGATNDLTFTEEVDMKEMEK |
| | | | GHVSFKPSLDQQR |
| | | | GMTNINDGLLR |
| | | | HFEIEVDIFEPQGISMLDAEASFITNDLL |
| | | | GSALTK |
| | | | ILEDMQEEDYLNFILFSGDVSTWK |
| | | | IYEDSDADLQLQGFYEEVANPLLTGVE |
| | | | MEYPENAILDLTQ |
| | | | NTYQHFYDGSEIVVAGR |
| | | | LGIANAQMDFQVEVTTEK |
| | | | LIQDAVTGLTVNGQITGDK |
| | | | LIQDAVTGLTVNGQITGDKR |
| | | | LVDEDMNSFK |
| | | | LWAYLTIEQLLEK |
| | | | LWAYLTIEQLLEKR |
| | | | MSAQTHGLLGQFFQPFDFK |
| | | | NAHGEEKENLTAR |
| | | | NAIGGKFPLYNLGFGNNLNYNFLENMA |
| | | | LENHGFAR |
| | | | NMVVSFGDGVTFVVVLHQVWK |
| | | | NVAFVIDISGSMAGR |
| | | | PGSDPTKPDATLVVK |
| | | | RSLPEGVANGIEVYSTK |
| | | | SCPTCTDSLLNGDFTITYDVNR |
| | | | SLPEGVANGIEVYSTK |
| | | | STSIVIMLTDGDANVGESR |
| | | | STSIVIMLTDGDANVGESRPEK |
| | | | TAFITNFTLTIDGVTYPGNVK |
| | | | VSDIRPGSDPTKPDATLVVK |
| | | | VTFELTYEELLK |
| | | | VTFELTYEELLKR |
| | | | VVCWFVHNNGEGLIDGVHTDYIVPNLF |
| | | | YHFVTPLTSMVVTKPEDNEDER |
| Q14624 | ITIH4 | Inter-alpha-trypsin | AEAQAQYSAAVAK |
| | | inhibitor heavy chain H4 | AFITNFSMIIDGMTYPGIIK |
| | | | AFITNFSMIIDGMTYPGIIKEK |
| | | | AGFSWIEVTFK |
| | | | AGFSWIEVTFKNPLVWVHASPEHVV |
| | | | VTR |
| | | | AISGGSIQIENGYFVHYFAPEGLTTMPK |
| | | | ANTVQEATFQMELPK |
| | | | ANTVQEATFQMELPKK |
| | | | ANTVQEATFQMELPKKAFITNFSMIIDG |
| | | | MTYPGIIK |
| | | | APAVPAPIQAPSAILPLPGQSVER |
| | | | DQFNLIVFSTEATQWR |
| | | | DQFNLIVFSTEATQWRPSLVPASAENV |
| | | | NK |
| | | | DTDRFSSHVGGTLGQFYQEVLWGSPA |
| | | | ASDDGRR |
| | | | EKAEAQAQYSAAVAK |
| | | | EKAGFSWIEVTFK |
| | | | ETLFSVMPGLK |
| | | | FKPTLSQQQK |
| | | | FSSHVGGTLGQFYQEVLWGSPAASDD |
| | | | GR |
| | | | FSSHVGGTLGQFYQEVLWGSPAASDD |
| | | | GRR |
| | | | GPDVLTATVSGK |
| | | | GPDVLTATVSGKLPTQNITFQTESSVAE |
| | | | QEAEFQSPK |
| | | | HLQMDIHIFEPQGISFLETESTFMTNQL |
| | | | VDALTTWQNK |
| | | | HLQMDIHIFEPQGISFLETESTFMTNQL |
| | | | VDALTTWQNKTK |
| | | | HRQGPVNLLSDPEQGVEVTGQYER |
| | | | IHEDSDSALQLQDFYQEVANPLLTAVTF |
| | | | EYPSNAVEEVTQNNFR |
| | | | ILDDLSPR |
| | | | ILDDLSPRDQFNLIVFSTEATQWRPSLV |
| | | | PASAENVNK |
| | | | IPKPEASFSPR |
| | | | ITFELVYEELLK |
| | | | ITFELVYEELLKR |
| | | | KAFITNFSMIIDGMTYPGIIK |
| | | | KAFITNFSMIIDGMTYPGIIKEK |
| | | | LALDNGGLAR |
| | | | LCVDPR |
| | | | LDYQEGPPGVEISCWSVEL |
| | | | LGVYELLLK |
| | | | LLFKGSEMVVAGK |
| | | | LPEGSVSLIILLTDGDPTVGETNPR |
| | | | LPTQNITFQTESSVAEQEAEFQSPK |
| | | | LPTQNITFQTESSVAEQEAEFQSPKYIF |
| | | | HNFMER |
| | | | LQDRGPDVLTATVSGK |
| | | | LQDRGPDVLTATVSGKLPTQNITFQTES |
| | | | SVAEQEAEFQSPK |
| | | | LWAYLTIQQLLEQTVSASDADQQALR |
| | | | MNFRPGVLSSR |
| | | | NGIDIYSLTVDSR |
| | | | NMEQFQVSVSVAPNAK |
| | | | NPLVWVHASPEHVVVTR |
| | | | NQALNLSLAYSFVTPLTSMVVTK |
| | | | NQALNLSLAYSFVTPLTSMVVTKPDDQ |
| | | | EQSQVAEK |
| | | | NQALNLSLAYSFVTPLTSMVVTKPDDQ |
| | | | EQSQVAEKPMEGESR |
| | | | NVHSAGAAGSR |
| | | | NVHSGSTFFK |
| | | | NVVFVIDK |
| | | | PSLVPASAENVNK |
| | | | QGPVNLLSDPEQGVEVTGQYER |
| | | | QGPVNLLSDPEQGVEVTGQYEREK |
| | | | QLGLPGPPDVPDHAAYHPFR |
| | | | QLGLPGPPDVPDHAAYHPFRR |
| | | | RIHEDSDSALQLQDFYQEVANPLLTAVT |
| | | | FEYPSNAVEEVTQNNFR |
| | | | RLDYQEGPPGVEISCWSVEL |
| | | | RLGVYELLLK |
| | | | SFAAGIQALGGTNINDAMLMAVQLLDS |
| | | | SNQEER |
| | | | SPEQQETVLDGNLIIR |
| | | | TGLLLLSDPDK |
| | | | TGLLLLSDPDKVTIGLLFWDGR |
| | | | TGLLLLSDPDKVTIGLLFWDGRGEGLR |
| | | | VTIGLLFWDGR |
| | | | VVNRANTVQEATFQMELPKK |
| | | | WKETLFSVMPGLK |
| | | | YIFHNFMER |
| | | | YSLFCLGFGFDVSYAFLEK |
| | | | YYLQGAK |
| Q8WWA0 | ITLN1 | Intelectin-1 | DECPSAFDGLYFLR |
| | | | DLGIWHVPNK |
| | | | EFTAGFVQFR |
| | | | EITEAAVLLFYR |
| | | | TDTGFLQTLGHNLFGIYQK |
| Q9Y287 | ITM2B | Integral membrane | AGTYLPQSYLIHEHMVITDR |
| | | protein 2B | CYVIPLNTSIVMPPR |
| | | | IENIDHLGFFIYR |
| | | | IFEEEEVEFISVPVPEFADSDPANIVHDF |
| | | | NK |
| | | | LTAYLDLNLDK |
| | | | NLLELLINIK |
| P03952 | KLKB1 | Plasma kallikrein | CLLFSFLPASSINDMEK |
| | | | CQFFSYATQTFHK |
| | | | CQFFTYSLLPEDCK |
| | | | CQFFTYSLLPEDCKEEK |
| | | | DSVTGTLPK |
| | | | DTPFSQIK |
| | | | DTPFSQIKEIIIHQNYK |
| | | | EIIIHQNYK |
| | | | EKGEIQNILQK |
| | | | FGCFLK |
| | | | FGCFLKDSVTGTLPK |
| | | | GDTSTIYTNCWVTGWGFSK |
| | | | GEIQNILQK |
| | | | GGDVASMYTPNAQYCQMR |
| | | | GVNFNVSK |
| | | | HLCGGSLIGHQWVLTAAHCFDGLPLQD |
| | | | VWR |
| | | | IAYGTQGSSGYSLR |
| | | | IVGGTNSSWGEWPWQVSLQVK |
| | | | IYPGVDFGGEELNVTFVK |
| | | | IYSGILNLSDITK |
| | | | IYSGILNLSDITKDTPFSQIK |
| | | | IYSGILNLSDITKDTPFSQIKEIIIHQNYK |
| | | | LCNTGDNSVCTTK |
| | | | LQAPLNYTEFQK |
| | | | LQAPLNYTEFQKPICLPSK |
| | | | LQAPLNYTEFQKPICLPSKGDTSTIYTN |
| | | | CWVTGWGFSK |
| | | | LSMDGSPTR |
| | | | LVGITSWGEGCAR |
| | | | TICTYHPNCLFFTFYTNVWK |
| | | | TSESGTPSSSTPQENTISGYSLLTCK |
| | | | TSESGTPSSSTPQENTISGYSLLTCKR |
| | | | VAEYMDWILEK |
| | | | VLSNVESGFSLKPCALSEIGCHMNIFQH |
| | | | LAFSDVDVAR |
| | | | VLTPDAFVCR |
| | | | VNIPLVTNEECQK |
| | | | VSEGNHDIALIK |
| | | | YSPGGTPTAIK |
| | | | GDSGGPLVCK |
| P01042 | KNG1 | Kininogen-1 | AATGECTATVGK |
| | | | DFVQPPTK |
| | | | DIPTNSPELEETLTHTITK |
| | | | DIPTNSPELEETLTHTITKLNAENNATFY |
| | | | FK |
| | | | ENFLFLTPDCK |
| | | | ESNEELTESCETK |
| | | | ESYYFDLTDGLS |
| | | | FKLDDDLEHQGGHVLDHGHK |
| | | | FSVATQTCQITPAEGPVVTAQYDCLGC |
| | | | VHPISTQSPDLEPILR |
| | | | GHGLGHGHEQQHGLGHGHK |
| | | | HGIQYFNNNTQHSSLFMLNEVK |
| | | | HGIQYFNNNTQHSSLFMLNEVKR |
| | | | IASFSQNCDIYPGK |
| | | | IASFSQNCDIYPGKDFVQPPTK |
| | | | ICVGCPR |
| | | | IGEIKEETTSHLR |
| | | | ITYSIVQTNCSK |
| | | | ITYSIVQTNCSKENFLFLTPDCK |
| | | | IYPTVNCQPLGMISLMK |
| | | | IYPTVNCQPLGMISLMKRPPGFSPFR |
| | | | KIYPTVNCQPLGMISLMK |
| | | | KLGQSLDCNAEVYVVPWEK |
| | | | KLGQSLDCNAEVYVVPWEKK |
| | | | KYFIDFVAR |
| | | | KYNSQNQSNNQFVLYR |
| | | | LDDDLEHQGGHVLDHGHK |
| | | | LGQSLDCNAEVYVVPWEK |
| | | | LGQSLDCNAEVYVVPWEKK |
| | | | LNAENNATFYFK |
| | | | LNAENNATFYFKIDNVK |
| | | | LNAENNATFYFKIDNVKK |
| | | | QVVAGLNFR |
| | | | RPPGFSPFR |
| | | | SLWNGDTGECTDNAYIDIQLR |
| | | | SSTKFSVATQTCQITPAEGPVVTAQYD |
| | | | CLGCVHPISTQSPDLEPILR |
| | | | SVSEINPTTQMK |
| | | | TVGSDTFYSFK |
| | | | TVGSDTFYSFKYEIK |
| | | | TWQDCEYK |
| | | | TWQDCEYKDAAK |
| | | | YEIKEGDCPVQSGK |
| | | | YFIDFVAR |
| | | | YNSQNQSNNQFVLYR |
| P24043 | LAMA2 | Laminin subunit alpha-2 | AEQTILPLVDEALQHTTTK |
| | | | EDFLDILYDIHYILIK |
| | | | EDLHLEPFYWK |
| | | | GLFPAVLNLASNALITTNATCGEK |
| | | | GTSEDCQPCACPLNIPSNNFSPTCH |
| | | | LDR |
| | | | LADEINSIIDYVEDIQTK |
| | | | LEQMVMSINLTGPLPAPYK |
| | | | LIQLAEGNLNTLVTEMNELLTR |
| | | | MLYGLENMTQELK |
| | | | MDGMGIEMIDEK |
| | | | QANISIVDIDTNQEENIATSSSGNNFGLD |
| | | | LK |
| | | | QEGILYVDGASNR |
| | | | RVNGTIFGGICEPCQCFGHAESCDDVT |
| | | | GECLNCK |
| | | | SLGLICDGCPVGYTGPR |
| | | | TPYNILSSPDYVGVTK |
| | | | VSQAESHAAQLNDSSAVLDGILDEAK |
| | | | VSQAESHAAQLNDSSAVLDGILDEAKNI |
| | | | SFNATAAFK |
| | | | WYPNISTVMFK |
| | | | YIGGGVCINCTQNTAGINCETCTDGFFR |
| | | | PK |
| | | | YMQNLTVEQPIEVK |
| P07942 | LAMB1 | Laminin subunit beta-1 | AMDLDQDVLSALAEVEQLSK |
| | | | CGGPGCGGLVTVAHNAWQK |
| | | | CLAGYYGDPIIGSGDHCRPCPCPDGPD |
| | | | SGR |
| | | | CVCNYLGTVQEHCNGSDCQCDK |
| | | | DILAQSPAAEPLK |
| | | | EGFYDLSSEDPFGCK |
| | | | ELAEQLEFIK |
| | | | GIETPQCDQSTGQCVCVEGVEGPR |
| | | | GLNCELCMDFYHDLPWRPAEGR |
| | | | IPSWTGAGFVR |
| | | | KCGGPGCGGLVTVAHNAWQK |
| | | | MEMPSTPQQLQNLTEDIR |
| | | | NFLTQDSADLDSIEAVANEVLK |
| | | | QADEDIQGTQNLLTSIESETAASEETLF |
| | | | NASQR |
| | | | SCYQDPVTLQLACVCDPGYIGSR |
| | | | SLDIFTVGGSGDGVVTNSAWETFQR |
| | | | VESLSQVEVILQHSAADIAR |
| | | | VNASTTEPNSTVEQSALMR |
| | | | YFAYDCEASFPGISTGPMK |
| | | | YSDIEPSTEGEVIFR |
| P11047 | LAMC1 | Laminin subunit gamma-1 | AFDITYVR |
| | | | AVEIYASVAQLSPLDSETLENEANNIK |
| | | | CDQCEENYFYNR |
| | | | IPAINQTITEANEK |
| | | | KIPAINQTITEANEK |
| | | | KQDDADQDMMMAGMASQAAQEAEIN |
| | | | AR |
| | | | LGNNEACSSCHCSPVGSLSTQCDS |
| | | | YGR |
| | | | LLNNLTSIK |
| | | | LNTFGDEVENDPK |
| | | | LQELESLIANLGTGDEMVTDQAFEDR |
| | | | LSAEDLVLEGAGLR |
| | | | PSAYNFDNSPVLQEWVTATDIR |
| | | | QDIAVISDSYFPR |
| | | | QVLSYGQNLSFSFR |
| | | | SYYYAISDFAVGGR |
| | | | TANDTSTEAYNLLLR |
| | | | TGGDEQQALCTDEFSDISPLTGGNVAF |
| | | | STLEGR |
| | | | TLAGENQTAFEIEELNR |
| | | | VAAANVSVTQPESTGDPNNMTLLAEEA |
| | | | R |
| | | | VNNTLSSQISR |
| P18428 | LBP | Lipopolysaccharide- | ATAQMLEVMFK |
| | | binding protein | ATAQMLEVMFKGEIFHR |
| | | | DFLFLGANVQYMR |
| | | | FNDKLAEGFPLPLLK |
| | | | GISISVNLLLGSESSGR |
| | | | GLQYAAQEGLLALQSELLR |
| | | | GRYEFHSLNIHSCELLHSALRPVPGQG |
| | | | LSLSISDSSIR |
| | | | ICEMIQK |
| | | | ITDKGLQYAAQEGLLALQSELLR |
| | | | ITLPDFTGDLR |
| | | | ITLPDFTGDLRIPHVGR |
| | | | LAEGFPLPLLK |
| | | | LAEGFPLPLLKR |
| | | | LQGSFDVSVK |
| | | | LSVATNVSATLTFNTSK |
| | | | LYPNMNLELQGSVPSAPLLNFSPGNLS |
| | | | VDPYMEIDAFVLLPSSSK |
| | | | LYPNMNLELQGSVPSAPLLNFSPGNLS |
| | | | VDPYMEIDAFVLLPSSSKEPVFR |
| | | | MVYFAISDYVENTASLVYHEEGYLNFSI |
| | | | TDDMIPPDSNIR |
| | | | NHRSPVTLLAAVMSLPEEHNK |
| | | | PTVTASSCSSDIADVEVDMSGDLGWLL |
| | | | NLFHNQIESK |
| | | | PVPGQGLSLSISDSSIR |
| | | | RVQLYDLGLQIHK |
| | | | SPVTLLAAVMSLPEEHNK |
| | | | SVSSDLQPYLQTLPVTTEIDSFADIDYSL |
| | | | VEAPR |
| | | | VGLFNAELLEALLNYYILNTFYPK |
| | | | VQLYDLGLQIHK |
| | | | YEFHSLNIHSCELLHSALR |
| | | | YEFHSLNIHSCELLHSALRPVPGQGLSL |
| | | | SISDSSIR |
| P04180 | LCAT | Phosphatidylcholine- | AELSNHTRPVILVPGCLGNQLEAK |
| | | sterol acyltransferase | DLLAGLPAPGVEVYCLYGVGLPTPR |
| | | | FFADLHFEEGWYMWLQSR |
| | | | FIDGFISLGAPWGGSIK |
| | | | FIDGFISLGAPWGGSIKPMLVLASGDNQ |
| | | | GIPIMSSIK |
| | | | ITTTSPWMFPSR |
| | | | KTEDFFTIWLDLNMFLPLGVDCWIDNTR |
| | | | LAGLVEEMHAAYGK |
| | | | LAGYLHTLVQNLVNNGYVR |
| | | | LDKPDVVNWMCYR |
| | | | LEPGQQEEYYR |
| | | | MAWPEDHVFISTPSFNYTGR |
| | | | PVILVPGCLGNQLEAK |
| | | | SSGLVSNAPGVQIR |
| | | | STELCGLWQGR |
| | | | TEDFFTIWLDLNMFLPLGVDCWIDNTR |
| | | | TYIYDHGFPYTDPVGVLYEDGDDTVAT |
| | | | R |
| | | | TYSVEYLDSSK |
| P80188 | LCN2 | Neutrophil gelatinase- | CDYWIR |
| | | associated lipocalin | EDKDPQKMYATIYELK |
| | | | EDKSYNVTSVLFR |
| | | | ELTSELK |
| | | | ELTSELKENFIR |
| | | | MYATIYELK |
| | | | MYATIYELKEDK |
| | | | MYATIYELKEDKSYNVTSVLFR |
| | | | SLGLPENHIVFPVPIDQCIDG |
| | | | SYNVTSVLFR |
| | | | SYPGLTSYLVR |
| | | | TFVPGCQPGEFTLGNIK |
| | | | TKELTSELKENFIR |
| | | | VPLQQNFQDNQFQGK |
| | | | VVSTNYNQHAMVFFK |
| | | | WYVVGLAGNAILR |
| P13796 | LCP1 | Plastin-2 | AYYHLLEQVAPK |
| | | | EGICAIGGTSEQSSVGTQHSYSEEEK |
| | | | FSLVGIGGQDLNEGNR |
| | | | HVIPMNPNTNDLFNAVGDGIVLCK |
| | | | ISFDEFIK |
| | | | ISTSLPVLDLIDAIQPGSINYDLLK |
| | | | LNLAFIANLFNR |
| | | | LSPEELLLR |
| | | | MINLSVPDTIDER |
| | | | VNDDIIVNWVNETLR |
| | | | VNHLYSDLSDALVIFQLYEK |
| | | | VYALPEDLVEVNPK |
| | | | YAFVNWINK |
| P48357 | LEPR | Leptin receptor | FNSSGTHFSNLSK |
| | | | GSFQMVHCNCSVHECCECLVPVPTAK |
| | | | ILTSVGSNVSFHCIYK |
| | | | INHSLGSLDSPPTCVLPDSVVKPLPPSS |
| | | | VK |
| | | | IPQSQYDVVSDHVSK |
| | | | ISWSSPPLVPFPLQYQVK |
| | | | IVSATSLLVDSILPGSSYEVQVR |
| | | | LDGLGYWSNWSNPAYTVVMDIK |
| | | | LNDTLLMCLK |
| | | | LSCMPPNSTYDYFLLPAGLSK |
| | | | SEQDRNCSLCADNIEGK |
| | | | SSLYCSDIPSIHPISEPK |
| | | | VHLLYVLPEVLEDSPLVPQK |
| | | | VTFFNLNETKPR |
| | | | YSENSTTVIR |
| | | | YVINHHTSCNGTWSEDVGNHTK |
| | | | YYIHDHFIPIEK |
| Q08380 | LGALS3BP | Galectin-3-binding protein | AAFGQGSGPIMLDEVQCTGTEASLADC |
| | | | K |
| | | | AAIPSALDTNSSK |
| | | | ALGFENATQALGR |
| | | | ALMLCEGLFVADVTDFEGWK |
| | | | ASHEEVEGLVEK |
| | | | AVDTWSWGER |
| | | | DAGVVCTNETR |
| | | | DAGVVCTNETRSTHTLDLSR |
| | | | ELSEALGQIFDSQR |
| | | | EPGSNVTMSVDAECVPMVR |
| | | | FPMMLPEELFELQFNLSLYWSHEALFQ |
| | | | K |
| | | | GCDLSISVNVQGEDALGFCGHTVILTAN |
| | | | LEAQALWK |
| | | | GLNLTEDTYK |
| | | | GLNLTEDTYKPR |
| | | | GQWGTVCDNLWDLTDASVVCR |
| | | | IDITLSSVK |
| | | | IYTSPTWSAFVTDSSWSAR |
| | | | KTLQALEFHTVPFQLLAR |
| | | | LCLQFLAWNFEALTQAEAWPSVPTDLL |
| | | | QLLLPR |
| | | | PFYLTNSSGVD |
| | | | QLQGYCASLFAILLPQDPSFQMPLDLY |
| | | | AYAVATGDALLEK |
| | | | RIDITLSSVK |
| | | | SDLAVPSELALLK |
| | | | SQLVYQSR |
| | | | STSSFPCPAGHFNGFR |
| | | | TLQALEFHTVPFQLLAR |
| | | | TVIRPFYLTNSSGVD |
| | | | VEIFYR |
| | | | VSWSLVYLPTIQSCWNYGFSCSSDELP |
| | | | VLGLTK |
| | | | YKGLNLTEDTYKPR |
| | | | YSSDYFQAPSDYR |
| | | | YYPYQSFQTPQHPSFLFQDK |
| | | | YYPYQSFQTPQHPSFLFQDKR |
| Q8N6C8 | LILRA3 | Leukocyte | APYVWSLPSDLLGLLVPGVSK |
| | | immunoglobulin-like | ARPFLSVRPGPTVASGENVTLLCQSQG |
| | | receptor subfamily A | GMHTFLLTK |
| | | member 3 | CQGSLETQEYHLYR |
| | | | CYGSLSSNPYLLTHPSDPLELVVSGAA |
| | | | ETLSPPQNK |
| | | | EGAADSPLR |
| | | | GQFPILSITWEHAGR |
| | | | KPSLSVQPGPVVAPGEK |
| | | | LTFQCGSDAGYDR |
| | | | PFLSVRPGPTVASGENVTLLCQSQGG |
| | | | MHTFLLTK |
| | | | PGPTVASGENVTLLCQSQGGMHTFLLT |
| | | | K |
| | | | PTLSALPSPVVTSGGNVTIQCDSQVAF |
| | | | DGFILCK |
| | | | PTLWAEPGSVITQGSPVTLR |
| | | | SYGGQYTCSGAYNLSSEWSAPSDPLDI |
| | | | LITGQIR |
| | | | AIFSVGPVSPSR |
| | | | YQAEFPMSPVTSAHAGTYR |
| | | | PTLWAEPGSVITQGSPVTLR |
| | | | QPQAGLSQANFTLGPVSR |
| P08519 | LPA | Apolipoprotein(a) | ATTVTGTPCQEWAAQEPHR |
| | | | CPGSIVGGCVAHPHSWPWQVSLR |
| | | | EAQLLVIENEVCNHYK |
| | | | FVTWIEGMMR |
| | | | GISSTTVTGRTCQSWSSMIPHWHQR |
| | | | GSFSTTVTGR |
| | | | GTDSCQGDSGGPLVCFEK |
| | | | HFCGGTLISPEWVLTAAHCLK |
| | | | HSTFIPGTNKWAGLEK |
| | | | IPLYYPNAGLTR |
| | | | KLFDYCDIPLCASSSFDCGKPQVEPK |
| | | | LFDYCDIPLCASSSFDCGK |
| | | | LFDYCDIPLCASSSFDCGKPQVEPK |
| | | | LFLEPTQADIALLK |
| | | | NPDADTGPWCFTMDPSIR |
| | | | NPDAEIRPWCYTMDPSVR |
| | | | NPDAEISPWCYTMDPNVR |
| | | | NPDAVAAPYCYTR |
| | | | NPDGDINGPWCYTMNPR |
| | | | NPDPVAAPWCYTTDPSVR |
| | | | NPDPVAAPYCYTR |
| | | | NPDSGKQPWCYTTDPCVR |
| | | | PWCYTMDPSVR |
| | | | QPWCYTTDPCVR |
| | | | RIPLYYPNAGLTR |
| | | | TCQAWSSMTPHQHNR |
| | | | TCQAWSSMTPHSHS |
| | | | TECYITGWGETQGTFGTGLLK |
| | | | TPAYYPNAGLIK |
| | | | TPENYPNAGLTENYCR |
| | | | TPENYPNAGLTR |
| | | | TPENYPNDGLTMNYCR |
| | | | TPEYYPNAGLIMNYCR |
| | | | TTENYPNAGLIMNYCR |
| | | | TTEYYPNGGLTR |
| | | | VILGAHQEVNLESHVQEIEVSR |
| | | | VMPACLPSPDYMVTAR |
| | | | YICAEHLAR |
| | | | WEYCNLTR |
| P02750 | LRG1 | Leucine-rich alpha-2- | ALGHLDLSGNR |
| | | glycoprotein | CAGPEAVK |
| | | | CAGPEAVKGQTLLAVAK |
| | | | DCQVFR |
| | | | DGFDISGNPWICDQNLSDLYR |
| | | | DKMFSQNDTR |
| | | | DLLLPQPDLR |
| | | | ENQLEVLEVSWLHGLK |
| | | | GPLQLER |
| | | | GQTLLAVAK |
| | | | KLPPGLLANFTLLR |
| | | | LHLEGNKLQVLGK |
| | | | LPPGLLANFTLLR |
| | | | LQELHLSSNGLESLSPEFLR |
| | | | LQELHLSSNGLESLSPEFLRPVPQLR |
| | | | LQVLGKDLLLPQPDLR |
| | | | MFSQNDTR |
| | | | NALTGLPPGLFQASATLDTLVLK |
| | | | QLDMLDLSNNSLASVPEGLWASLGQP |
| | | | NWDMR |
| | | | QLDMLDLSNNSLASVPEGLWASLGQP |
| | | | NWDMRDGFDISGNP |
| | | | WICDQNLSDLYR |
| | | | SDHGSSISCQPPAEIPGYLPADTVHLAV |
| | | | EFFNLTHLPANLLQGASK |
| | | | TLDLGENQLETLPPDLLR |
| | | | VAAGAFQGLR |
| | | | WLQAQK |
| | | | YLFLNGNK |
| | | | YLFLNGNKLAR |
| Q14767 | LTBP2 | Latent-transforming | CEEVIPDEEFDPQNSR |
| | | growth factor beta- | DGTQQAVPLEHPSSPWGLNLTEK |
| | | binding protein 2 | LNLTHCQDINECLTLGLCK |
| | | | NVCGGQCCPGWTTANSTNHCIKPVCE |
| | | | PPCQNR |
| | | | VHIHHPPEASVQIHQVAQVR |
| P02788 | LTF | Lactotransferrin | ADAVTLDGGFIYEAGLAPYK |
| | | | CAFSSQEPYFSYSGAFK |
| | | | CGLVPVLAENYK |
| | | | CLAENAGDVAFVK |
| | | | CNQWSGLSEGSVTCSSASTTEDCIALV |
| | | | LK |
| | | | CSTSPLLEACEFLR |
| | | | DSPIQCIQAIAENR |
| | | | DVTVLQNTDGNNNEAWAK |
| | | | EDAIWNLLR |
| | | | ESTVFEDLSDEAER |
| | | | ESTVFEDLSDEAERDEYELLCPDNTR |
| | | | FDEYFSQSCAPGSDPR |
| | | | FQLFGSPSGQK |
| | | | FQLFGSPSGQKDLLFK |
| | | | FQLFGSPSGQKDLLFKDSAIGFSR |
| | | | GEADAMSLDGGYVYTAGK |
| | | | GGSFQLNELQGLK |
| | | | IDSGLYLGSGYFTAIQNLR |
| | | | KGGSFQLNELQGLK |
| | | | LADFALLCLDGK |
| | | | LRPVAAEVYGTER |
| | | | NLLFNDNTECLAR |
| | | | PFLNWTGPPEPIEAAVAR |
| | | | SNLCALCIGDEQGENK |
| | | | SQQSSDPDPNCVDRPVEGYLAVAVVR |
| | | | SVNGKEDAIWNLLR |
| | | | SVQWCAVSQPEATK |
| | | | TAGWNIPMGLLFNQTGSCK |
| | | | TAGWNVPIGTLR |
| | | | TAGWNVPIGTLRPFLNWTGPPEPIEAA |
| | | | VAR |
| | | | VVWCAVGEQELR |
| | | | YLGPQYVAGITNLK |
| | | | YLGPQYVAGITNLKK |
| | | | YYGYTGAFR |
| Q9Y5Y7 | LYVE1 | Lymphatic vessel | AEELSIQVSCR |
| | | endothelial hyaluronic | ANQQLNFTEAK |
| | | acid receptor 1 | ASFETCSYGWVGDGFVVISR |
| | | | DQVETALK |
| | | | IMGITLVSK |
| | | | KANQQLNFTEAK |
| | | | LLGLSLAGK |
| | | | LLGLSLAGKDQVETALK |
| | | | NGVGVLIWK |
| Q7Z7M0 | MEGF8 | Multiple epidermal growth | ACDLHLWENQGAGWWHNVSAR |
| | | factor-like domains | ALLTNVSSVALGSR |
| | | protein 8 | CLQGDFSGPLGGGNCSLWVGEGLGLP |
| | | | VALPAR |
| | | | DFWVLNLTTLQWR |
| | | | EAPGFVTDGAGNYSVNGNCEWLIEAPS |
| | | | PQHR |
| | | | EVFWAGNCSEAACGAADCEQCTR |
| | | | GFIYPMLPGGPGGPGAEDVAVWTR |
| | | | GPGTLGWCVHNESCLPR |
| | | | GPGTLGWCVHNESCLPRPEQAR |
| | | | ILLDFLFLDTECTYDYLFVYDGDSPR |
| | | | LLSSPEACNQSGACTWCHGACLSGDQ |
| | | | AHR |
| | | | MLLHLFSDANYNLLGFNASFR |
| | | | TGYTMDNMTGLCR |
| | | | TPHDLFSSGLFR |
| | | | VNSTELFHVDR |
| P22894 | MMP8 | Matrix metalloproteinase | DAFELWSVASPLIFTR |
| | | 8 | DISNYGFPSSVQAIDAAVFYR |
| | | | FFGLNVTGK |
| | | | FFGLNVTGKPNEETLDMMK |
| | | | FYQLPSNQYQSTR |
| | | | GNQYWALSGYDILQGYPK |
| | | | NYTPQLSEAEVER |
| | | | SISGAFPGIESK |
| | | | YYAFDLIAQR |
| P14780 | MMP9 | Matrix metalloproteinase- | AFALWSAVTPLTFTR |
| | | 9 | DGLLAHAFPPGPGIQGDAHFDDDELWS |
| | | | LGK |
| | | | FGNADGAACHFPFIFEGR |
| | | | FQTFEGDLK |
| | | | LFFFSGR |
| | | | LFGFCPTR |
| | | | LGLGADVAQVTGALR |
| | | | LWCATTSNFDSDK |
| | | | LYTQDGNADGK |
| | | | MFPGVPLDTHDVFQYR |
| | | | MLLFSGR |
| | | | QLAEEYLYR |
| | | | QLSLPETGELDSATLK |
| | | | QSTLVLFPGDLR |
| | | | QVWVYTGASVLGPR |
| | | | SDGLPWCSTTANYDTDDR |
| | | | SLGPALLLLQK |
| | | | WCATTANYDR |
| | | | WHHHNITYWIQNYSEDLPR |
| Q13201 | MMRN1 | Multimerin-1 | AQEQQSLIHTNQAESHTAVGR |
| | | | DTEENLHVLNQTLAEVLFPMDNK |
| | | | EVHEQLLSTEQVSDQK |
| | | | FNPGAESVVLSNSTLK |
| | | | FVLVQENRPTLTDIVELR |
| | | | GLTEFVEPIIQIK |
| | | | HPFTGDNCTIK |
| | | | HSWTIPEDGNSQK |
| | | | IDNISLTVNDVR |
| | | | IENLTSAVNSLNFIIK |
| | | | IFQNDMQETVAQLFK |
| | | | INEYALEMEDGLNK |
| | | | INNLTVSLEMEK |
| | | | KIDNISLTVNDVR |
| | | | KPTVNLTTVLIGR |
| | | | KSNEQATSLNTVGGTGGIGGVGGTGG |
| | | | VGNR |
| | | | LNDSIQTLVNDNQR |
| | | | LQNLTLPTNASIK |
| | | | LSPTVILDNQVTYVPGGK |
| | | | LVEENALAPDFSK |
| | | | MSEQLNDLTYDMEILQPLLEQGASLR |
| | | | MYQMFNETTSQVR |
| | | | NAPAAESVSNNVTEYMSTLHENIK |
| | | | NTDNIIYPEEYSSCSR |
| | | | SILYYESLNK |
| | | | SNEQATSLNTVGGTGGIGGVGGTGGV |
| | | | GNR |
| | | | TLHEVLTMCHNASTSVSELNATIPK |
| | | | TMTIINNAIDFIQDNYALK |
| | | | TQAALSNLTCCIDR |
| | | | TVSSLSEDLESTR |
| | | | VLTGDALLELNYGQEVWLR |
| | | | VMSAEIATTPEK |
| | | | VNESVVSIAAQQK |
| P05164 | MPO | Myeloperoxidase | AADYLHVALDLLER |
| | | | DFVNCSTLPALNLASWR |
| | | | DYLPLVLGPTAMR |
| | | | FCGLPQPETVGQLGTVLR |
| | | | FPTDQLTPDQER |
| | | | IANVFTNAFR |
| | | | FWWENEGVFSMQQR |
| | | | IGLDLPALNMQR |
| | | | IICDNTGITTVSK |
| | | | NLRNMSNQLGLLAVNQR |
| | | | NMSNQLGLLAVNQR |
| | | | NQADCIPFFR |
| | | | NQINALTSFVDASMVYGSEEPLAR |
| | | | QNQIAVDEIR |
| | | | QALAQISLPR |
| | | | RPFNVTDVLTPAQLNVLSK |
| | | | SCPACPGSNITIR |
| | | | SLMFMQWGQLLDHDLDFTPEPAAR |
| | | | SSEMPELTSMHTLLLR |
| | | | VFFASWR |
| | | | VGPLLACIIGTQFR |
| | | | VVLEGGIDPILR |
| | | | WLPAEYEDGFSLPYGWTPGVK |
| | | | ALLPFDNLHDDPCLLTNR |
| P22897 | MRC1 | Macrophage mannose | ACIGFGGNLVSIQNEK |
| | | receptor 1 | ALGGDLASINNK |
| | | | CVDAVSPSAVQTAACNQDAESQK |
| | | | DSTFSAWTGLNDVNSEHTFLWTDGR |
| | | | EGGDLTSIHTIEELDFIISQLGYEPNDEL |
| | | | WIGLNDIK |
| | | | EGWNFYSNK |
| | | | EQAFLTYHMKDSTFSAWTGLNDVNSE |
| | | | HTFLWTDGRGVHYTNWGK |
| | | | FEGSESLWNK |
| | | | FEGSESLWNKDPLTSVSYQINSK |
| | | | FQWHEAETYCK |
| | | | FTHWNSDMPGR |
| | | | GDPTMSWNDINCEHLNNWICQIQK |
| | | | GEDLFFNYGNR |
| | | | GNTTLNSFVIPSESDVPTHCPSQWWPY |
| | | | AGHCYK |
| | | | GTFQWTIEEEVR |
| | | | GYEAMYTLLGNANGATCAFPFK |
| | | | HHFYCYMIGHTLSTFAEANQTQNNENA |
| | | | YLTTIEDR |
| | | | IFGFMEEER |
| | | | IQMYFEWSDGTPVTFTK |
| | | | IYGTTDNLCSR |
| | | | KGNTTLNSFVIPSESDVPTHCPSQWWP |
| | | | YAGHCYK |
| | | | LCLGVPSK |
| | | | LFGYCPLK |
| | | | LFWLGLTYGSPSEGFTWSDGSPVSYE |
| | | | NWAYGEPNNYQNVEYCGELK |
| | | | LHNSLIASILDPYSNAFAWLQMETSNER |
| | | | MGSSLVSIESAAESSFLSYR |
| | | | NDAQSAYFIGLLISLDK |
| | | | NDAQSAYFIGLLISLDKK |
| | | | NDCVALHASSGFWSNIHCSSYK |
| | | | NDTLLGIK |
| | | | NFGDLVSIQSESEK |
| | | | NVEGTWLWINNSPVSFVNWNTGDPSG |
| | | | ER |
| | | | NWGQASLECLR |
| | | | PEPTPAPQDNPPVTEDGWVIYK |
| | | | SCVSLNPGK |
| | | | SDGWLWCGTTTDYDTDK |
| | | | SDGWLWCGTTTDYDTDKLFGYCPLK |
| | | | TAHCNESFYFLCK |
| | | | TGIAGGLWDVLK |
| | | | TNFWIGLFR |
| | | | VWIALNSNLTDNQYTWTDK |
| | | | WECKNDTLLGIK |
| | | | WENLECVQK |
| | | | WVSESQIMSVAFK |
| | | | YFWTGLSDIQTK |
| | | | YLNWLPGSPSAEPGK |
| | | | YTNWAADEPK |
| P13591 | NCAM1 | Neural cell adhesion | AVGEEVWHSK |
| | | molecule 1 | CVVTGEDGSESEATVNVK |
| | | | DGEQIEQEEDDEKYIFSDDSSQLTIK |
| | | | DGQLLPSSNYSNIK |
| | | | EASMEGIVTIVGLKPETTYAVR |
| | | | EGEDAVIVCDVVSSLPPTIIWK |
| | | | FFLCQVAGDAK |
| | | | FIVLSNNYLQIR |
| | | | GLGEISAASEFK |
| | | | IGQESLEFILVQADTPSSPSIDQVEPYS |
| | | | STAQVQFDEPEATGGVPILK |
| | | | ISVVWNDDSSSTLTIYNANIDDAGIYK |
| | | | ITYVENQTAMELEEQVTLTCEASGDPIP |
| | | | SITWR |
| | | | IYNTPSASYLEVTPDSENDFGNYNCTA |
| | | | VNR |
| | | | LQGPVAVYTWEGNQVNITCEVFAYPSA |
| | | | TISWFR |
| | | | NDEAEYICIAENK |
| | | | SIQYTDAGEYICTASNTIGQDSQSMYLE |
| | | | VQYAPK |
| Q7Z3B1 | NEGR1 | Neuronal growth | IYDISNDMTVNEGTNVTLTCLATGKPEP |
| | | regulator 1 | SISWR |
| | | | LFNGQQGIIIQNFSTR |
| | | | SILTVTNVTQEHFGNYTCVAANK |
| P61916 | NPC2 | Epididymal secretory | AVVHGILMGVPVPFPIPEPDGCK |
| | | protein E1 | EVNVSPCPTQPCQLSK |
| | | | GQSYSVNVTFTSNIQSK |
| | | | LVVEWQLQDDKNQSLFCWEIPVQIVSH |
| | | | L |
| O14786 | NRP1 | Neuropilin-1 | CEWLIQAPDPYQR |
| | | | EGFSANYSVLQSSVSEDFK |
| | | | EGNKPVLFQGNTNPTDVVVAVFPK |
| | | | EWIQVDLGLLR |
| | | | FEVYGCK |
| | | | FVSDYETHGAGFSIR |
| | | | FVTAVGTQGAISK |
| | | | GPECSQNYTTPSGVIK |
| | | | IAPPPVVSSGPFLFIK |
| | | | IESPGYLTSPGYPHSYHPSEK |
| | | | IGYSNNGSDWK |
| | | | IKPATWETGISMR |
| | | | IMINFNPHFDLEDR |
| | | | LEIWDGFPDVGPHIGR |
| | | | LNYPENGWTPGEDSYR |
| | | | MSEIILEFESFDLEPDSNPPGGMFCR |
| | | | NLSALENYNFELVDGVK |
| | | | RGPECSQNYTTPSGVIK |
| | | | SFEGNNNYDTPELR |
| | | | SSSGILSMVFYTDSAIAK |
| | | | TGPIQDHTGDGNFIYSQADENQK |
| | | | YDYVEVFDGENENGHFR |
| Q02818 | NUCB1 | Nucleobindin-1 | DLELLIQTATR |
| | | | EFGDTGEGWETVEMHPAYTEEELR |
| | | | EVWEELDGLDPNR |
| | | | FHPDTDDVPVPAPAGDQK |
| | | | LPEVEVPQHL |
| | | | LSQETEALGR |
| | | | LVTLEEFLASTQR |
| | | | MDAEQDPNVQVDHLNLLK |
| | | | QFEHLDPQNQHTFEAR |
| | | | TFFILHDINSDGVLDEQELEALFTK |
| | | | VNVPGSQAQLK |
| | | | YLQEVIDVLETDGHFR |
| Q86UD1 | OAF | Out at first protein | ALILGELEK |
| | | homolog | FWLEQGVDSSVFEALPK |
| | | | GLEHLHMDVAVNFSQGALLSPHLHNVC |
| | | | AEAVDAIYTR |
| | | | GQSQFQALCFVTQLQHNEIIPSEAMAK |
| | | | LPDGQVTEESLQADSDADSISLELR |
| | | | QLCLWDEDPYPG |
| | | | SYSFDFYVPQR |
| | | | YGLSLAWYPCMLK |
| Q8WWZ8 | OIT3 | Oncoprotein-induced | DSLYFGIEPVVHVSGLESLVESCFATPT |
| | | transcript 3 protein | SK |
| | | | ELVGGLELFLTNTSCR |
| | | | GAGGEDSAGLQGQTLTGGPIR |
| | | | GLVLSEDNHTCQVPVLCK |
| | | | GVSNGTHVNILFSLK |
| | | | HFQVPVFK |
| | | | IVASNLVTGLPK |
| | | | LLIPVTCEFPR |
| | | | LYTISEGYVPNLR |
| | | | QACASFNGNCCLWNTTVEVK |
| | | | QTPGSSGDFIIR |
| | | | TCGTVVDVVNDK |
| | | | VLVCGVLDER |
| Q6UX06 | OLFM4 | Olfactomedin-4 | DQNTPVVHPPPTPGSCGHGGVVNISK |
| | | | DQNTPVVHPPPTPGSCGHGGVVNISKP |
| | | | SVVQLNWR |
| | | | DTISYTELDFELIK |
| | | | GFSYLYGAWGR |
| | | | GLYWVAPLNTDGR |
| | | | LLNLTVR |
| | | | LNDTTLQVLNTWYTK |
| | | | LYNTLDDLLLYINAR |
| | | | LYVYNDGYLLNYDLSVLQK |
| | | | PSVVQLNWR |
| | | | SLGSGGSVSQLFSNFTGSVDDR |
| | | | TEEIFYYYDTNTGK |
| | | | VNLTTNTIAVTQTLPNAAYNNR |
| P02763 | ORM1 | Alpha-1-acid glycoprotein | DTKTYMLAFDVNDEK |
| | | 1 | |
| | | | ENGTISRYVGGQEHFAHLLILR |
| | | | EQLGEFYEALDCLR |
| | | | EQLGEFYEALDCLRIPK |
| | | | EYQTRQDQCIYNTTYLNVQR |
| | | | EYQTRQDQCIYNTTYLNVQRENGTISR |
| | | | IPKSDVVYTDWK |
| | | | NWGLSVYADK |
| | | | NWGLSVYADKPETTK |
| | | | NWGLSVYADKPETTKEQLGEFYEALDC |
| | | | LR |
| | | | QDQCIYNTTYLNVQR |
| | | | QDQCIYNTTYLNVQRENGTISR |
| | | | SDVVYTDWK |
| | | | SDVVYTDWKK |
| | | | TYMLAFDVNDEK |
| | | | TYMLAFDVNDEKNWGLSVYADKPETTK |
| | | | YVGGQEHFAHLLILR |
| | | | YVGGQEHFAHLLILRDTK |
| | | | CEPLEK |
| | | | DKCEPLEK |
| | | | KQEEGES |
| | | | NEEYNKSVQEIQATFFYFTPNK |
| | | | NEEYNKSVQEIQATFFYFTPNKTEDTIF |
| | | | LR |
| | | | SVQEIQATFFYFTPNK |
| | | | SVQEIQATFFYFTPNKTEDTIFLR |
| | | | TEDTIFLR |
| | | | TEDTIFLREYQTR |
| | | | WFYIASAFR |
| | | | WFYIASAFRNEEYNK |
| P19652 | ORM2 | Alpha-1-acid glycoprotein | EHVAHLLFLR |
| | | 2 | EHVAHLLFLRDTK |
| | | | EQLGEFYEALDCLCIPR |
| | | | EYQTRQNQCFYNSSYLNVQR |
| | | | ITGKWFYIASAFR |
| | | | NWGLSFYADK |
| | | | NWGLSFYADKPETTK |
| | | | NWGLSFYADKPETTKEQLGEFYEALDC |
| | | | LCIPR |
| | | | QNQCFYNSSYLNVQR |
| | | | QNQCFYNSSYLNVQRENGTVSR |
| | | | SDVMYTDWK |
| | | | SDVMYTDWKK |
| | | | TLMFGSYLDDEK |
| | | | TLMFGSYLDDEKNWGLSFYADKPETTK |
| | | | YEGGREHVAHLLFLR |
| | | | YEGGREHVAHLLFLRDTK |
| Q99650 | OSMR | Oncostatin-M-specific | DKLVEEGTNVTICYVSR |
| | | receptor subunit beta | GTNIYCEASQGNVSEGMK |
| | | | IETSNVIWVGNYSTTVK |
| | | | ILFYNVVVENLDKPSSSELHSIPAPANS |
| | | | TK |
| | | | LPLTPVSLK |
| | | | LVEEGTNVTICYVSR |
| | | | MMQYNVSIK |
| | | | NIQNNVSCYLEGK |
| | | | NNFTYLCQIELHGEGK |
| | | | NVGPNTTSTVISTDAFR |
| | | | NVGPNTTSTVISTDAFRPGVR |
| | | | NWCNWQITQDSQETYNFTLIAENYLR |
| | | | SVNILFNLTHR |
| | | | VTTPDEHSSMLIHILLPMVFCVLLIMVMC |
| | | | YLK |
| | | | VYLMNPFSVNFENVNATNAIMTWKVHS |
| | | | IR |
| | | | WNQVLHWSWESELPLECATHFVR |
| | | | WSEWSGQNFTTLEAAPSEAPDVWR |
| Q15113 | PCOLCE | Procollagen C- | ECIWTITVPEGQTVSLSFR |
| | | endopeptidase enhancer | FCGDAVPGSISSEGNELLVQFVSDLSV |
| | | 1 | TADGFSASYK |
| | | | FDLEPDTYCR |
| | | | GESGYVASEGFPNLYPPNK |
| | | | GFLLWYSGR |
| | | | GPVLPPESFVVLHRPNQDQILTNLSK |
| | | | GVSYLLMGQVEENR |
| | | | PAPLVAPGNQVTLR |
| | | | TEESPSAPDAPTCPK |
| | | | TGGLDLPSPPTGASLK |
| | | | TGTLQSNFCASSLVVTATVK |
| | | | VFDLELHPACR |
| | | | YDALEVFAGSGTSGQR |
| | | | YDSVSVFNGAVSDDSR |
| Q8NBP7 | PCSK9 | Proprotein convertase | ADEYQPPDGGSLVEVYLLDTSIQSDHR |
| | | subtilisin/kexin type 9 | AGVVLVTAAGNFR |
| | | | AHNAFGGEGVYAIAR |
| | | | CCLLPQANCSVHTAPPAEASMGTR |
| | | | DDACLYSPASAPEVITVGATNAQDQPV |
| | | | TLGTLGTNFGR |
| | | | DVINEAWFPEDQR |
| | | | EHGIPAPQEQVTVACEEGWTLTGCSAL |
| | | | PGTSHVLGAYAVDNTCVVR |
| | | | GTVSGTLIGLEFIR |
| | | | SQLVQPVGPLVVLLPLAGGYSR |
| | | | VMVTDFENVPEEDGTR |
| Q9UHG3 | PCYOX1 | Prenylcysteine oxidase 1 | EKEDPEPSTDGTYVWK |
| | | | FGLNTVLTTDNSDLFINSIGIVPSVR |
| | | | FLNEMIAPVMR |
| | | | GELNTSIFSSR |
| | | | GELNTSIFSSRPIDK |
| | | | IAIIGAGIGGTSAAYYLR |
| | | | DLFER |
| | | | KMSNITFLNFDPPIEEFHQYYQHIVTTLV |
| | | | K |
| | | | LATMMVQGQEYEAGGSVIHPLNLHMK |
| | | | LFLSYDYAVK |
| | | | LLHALGGDDFLGMLNR |
| | | | MHMWVEDVLDK |
| | | | MMVQGQEYEAGGSVIHPLNLHMK |
| | | | MSNITFLNFDPPIEEFHQYYQHIVTTLVK |
| | | | MYEVVYQIGTETR |
| | | | SDFYDIVLVATPLNR |
| | | | SNLISGSVMYIEEK |
| | | | TLLETLQK |
| | | | VNYGQSTDINAFVGAVSLSCSDSGLWA |
| | | | VEGGNK |
| | | | WNGHTDMIDQDGLYEK |
| | | | YQSHDYAFSSVEK |
| O75594 | PGLYRP1 | Peptidoglycan recognition | AAQGLLACGVAQGALR |
| | | protein 1 | ALASECAQHLSLPLR |
| | | | TLGWCDVGYNFLIGEDGLVYEGR |
| | | | TLSPGNQLYHLIQNWPHYR |
| | | | YVVVSHTAGSSQNTPASCQQQAR |
| Q96PD5 | PGLYRP2 | N-acetylmuramoyl-L- | AGLLRPDYALLGHR |
| | | alanine amidase | ASLLTMAFLNGALDGVILGDYLSR |
| | | | DGSPDVTTADIGANTPDATK |
| | | | DTLPSCAVR |
| | | | EFTEAFLGCPAIHPR |
| | | | EGKEYGVVLAPDGSTVAVEPLLAGLEA |
| | | | GLQGR |
| | | | EYGVVLAPDGSTVAVEPLLAGLEAGLQ |
| | | | GR |
| | | | GCPDVQASLPDAK |
| | | | GFGVAIVGNYTAALPTEAALR |
| | | | GSQTQSHPDLGTEGCWDQLSAPR |
| | | | HTASAWLMSAPNSGPHNR |
| | | | LEPVHLQLQCMSQEQLAQVAANATK |
| | | | LEPVHLQLQCMSQEQLAQVAANATKEF |
| | | | TEAFLGCPAIHPR |
| | | | LLQLPLGFLYVHHTYVPAPPCTDFTR |
| | | | LYHFLLGAWSLNATELDPCPLSPELLGL |
| | | | TK |
| | | | PSLSHLLSQYYGAGVAR |
| | | | QNGAALTSASILAQQVWGTLVLLQR |
| | | | RVINLPLDSMAAPWETGDTFPDVVAIAP |
| | | | DVR |
| | | | SPPTMVDSLLAVTLAGNLGLTFLR |
| | | | TDCPGDALFDLLR |
| | | | TFTLLDPK |
| | | | TPEPRPSLSHLLSQYYGAGVAR |
| | | | TWPHFTATVK |
| | | | VINLPLDSMAAPWETGDTFPDVVAIAPD |
| | | | VR |
| | | | WGAAPYR |
| | | | YHQDTQGWGDIGYSFVVGSDGYVYEG |
| | | | R |
| P01833 | PIGR | Polymeric | ADEGWYWCGVK |
| | | immunoglobulin receptor | AFVNCDENSR |
| | | | AIQDPRLFAEEKAVADTR |
| | | | ANLTNFPENGTFVVNIAQLSQDDSGR |
| | | | ANLTNFPENGTFVVNIAQLSQDDSGRY |
| | | | K |
| | | | CGLGINSR |
| | | | CPLLVDSEGWVK |
| | | | DAGFYWCLTNGDTLWR |
| | | | DGSFSVVITGLR |
| | | | GGCITLISSEGYVSSK |
| | | | GLSFDVSLEVSQGPGLLNDTK |
| | | | GSVTFHCALGPEVANVAK |
| | | | GVAGGSVAVLCPYNR |
| | | | IIEGEPNLK |
| | | | IIEGEPNLKVPGNVTAVLGETLK |
| | | | ILLNPQDK |
| | | | LDIQGTGQLLFSVVINQLR |
| | | | LSDAGQYLCQAGDDSNSNK |
| | | | LSDAGQYLCQAGDDSNSNKK |
| | | | LSLLEEPGNGTFTVILNQLTSR |
| | | | LVSLTLNLVTR |
| | | | NADLQVLKPEPELVYEDLR |
| | | | QGHFYGETAAVYVAVEER |
| | | | QIGLYPVLVIDSSGYVNPNYTGR |
| | | | QSSGENCDVVVNTLGK |
| | | | SPIFGPEEVNSVEGNSVSITCYYPPTSV |
| | | | NR |
| | | | TVTINCPFK |
| | | | VPGNVTAVLGETLK |
| | | | VPGNVTAVLGETLKVPCHFPCK |
| | | | VYTVDLGR |
| | | | WNNTGCQALPSQDEGPSK |
| | | | YLCGAHSDGQLQEGSPIQAWQLFVNE |
| | | | ESTIPR |
| | | | YWCLWEGAQNGR |
| Q9UKJ1 | PILRA | Paired immunoglobulin- | HLSASMGGSVEIPFSFYYPWELATAPD |
| | | like type 2 receptor alpha | VR |
| | | | LFLNWTEGQK |
| | | | SPQNETLYSVLK |
| P00747 | PLG | Plasminogen | APWCHTTNSQVR |
| | | | ATTVTGTPCQDWAAQEPHR |
| | | | CEEDEEFTCR |
| | | | CSGTEASVVAPPPVVLLPDVETPSEED |
| | | | CMFGNGK |
| | | | CTTPPPSSGPTYQCLK |
| | | | EAQLPVIENK |
| | | | ELRPWCFTTDPNK |
| | | | ELRPWCFTTDPNKR |
| | | | FGMHFCGGTLISPEWVLTAAHCLEK |
| | | | FSPATHPSEGLEENYCR |
| | | | FSPATHPSEGLEENYCRNPDNDPQGP |
| | | | WCYTTDPEKR |
| | | | FVTWIEGVMR |
| | | | GNVAVTVSGHTCQHWSAQTPHTHNR |
| | | | GNVAVTVSGHTCQHWSAQTPHTHNRT |
| | | | PENFPCK |
| | | | GPWCFTTDPSVR |
| | | | GTSSTTTTGK |
| | | | HSIFTPETNPR |
| | | | ISKTMSGLECQAWDSQSPHAHGYIPSK |
| | | | KCSGTEASVVAPPPVVLLPDVETPSEE |
| | | | DCMFGNGK |
| | | | KLYDYCDVPQCAAPSFDCGK |
| | | | KLYDYCDVPQCAAPSFDCGKPQVEPK |
| | | | KQLGAGSIEECAAK |
| | | | LFLEPTR |
| | | | LSSPAVITDK |
| | | | LYDYCDVPQCAAPSFDCGK |
| | | | LYDYCDVPQCAAPSFDCGKPQVEPK |
| | | | NLDENYCR |
| | | | NPDADKGPWCFTTDPSVR |
| | | | NPDGDVGGPWCYTTNPR |
| | | | NPDNDPQGPWCYTTDPEK |
| | | | NPDNDPQGPWCYTTDPEKR |
| | | | QLGAGSIEECAAK |
| | | | QLGAGSIEECAAKCEEDEEFTCR |
| | | | RATTVTGTPCQDWAAQEPHR |
| | | | RWELCDIPR |
| | | | TECFITGWGETQGTFGAGLLK |
| | | | TMSGLECQAWDSQSPHAHGYIPSK |
| | | | TPENFPCK |
| | | | TPENYPNAGLTMNYCR |
| | | | VILGAHQEVNLEPHVQEIEVSR |
| | | | VIPACLPSPNYVVADR |
| | | | VQSTELCAGHLAGGTDSCQGDSGGPL |
| | | | VCFEK |
| | | | VVGGCVAHPHSWPWQVSLR |
| | | | VYLSECK |
| | | | WELCDIPR |
| | | | WEYCNLK |
| | | | YDYCDILECEEECMHCSGENYDGK |
| | | | YEFLNGR |
| | | | DKYILQGVTSWGLGCAR |
| | | | YILQGVTSWGLGCAR |
| | | | DVVLFEK |
| | | | EQQCVIMAENR |
| P55058 | PLTP | Phospholipid transfer | AGALQLLLVGDK |
| | | protein | AGALQLLLVGDKVPHDLDMLLR |
| | | | ALELVKQEGLR |
| | | | ATYFGSIVLLSPAVIDSPLK |
| | | | AVEPQLQEEER |
| | | | DPVASTSNLDMDFR |
| | | | EGHFYYNISEVK |
| | | | FLEQELETITIPDLR |
| | | | FLLNQQICPVLYHAGTVLLNSLLDTVPV |
| | | | R |
| | | | FRIYSNHSALESLALIPLQAPLK |
| | | | GAFFPLTER |
| | | | GAFFPLTERNWSLPNR |
| | | | GKEGHFYYNISEVK |
| | | | GVQIPLPEGINFVHEVVTNHAGFLTIGA |
| | | | DLHFAK |
| | | | IYSNHSALESLALIPLQAPLK |
| | | | KVYDFLSTFITSGMR |
| | | | LQITNASLGLR |
| | | | MHAAFGGTFK |
| | | | MKVSNVSCQASVSR |
| | | | MLQITNASLGLR |
| | | | MVYVAFSEFFFDSAMESYFR |
| | | | QLLYWFFYDGGYINASAEGVSIR |
| | | | SSVDELVGIDYSLMK |
| | | | SSVDELVGIDYSLMKDPVASTSNLDMD |
| | | | FR |
| | | | TGLELSR |
| | | | TMLQIGVMPMLNER |
| | | | VPHDLDMLLR |
| | | | VSNVSCQASVSR |
| | | | VTELQLTSSELDFQPQQELMLQITNASL |
| | | | GLR |
| | | | VYDFLSTFITSGMR |
| P27169 | PON1 | Serum | AKLIALTLLGMGLALFR |
| | | paraoxonase/arylesterase | EVQPVELPNCNLVK |
| | | 1 | FDVSSFNPHGISTFTDEDNAMYLLVVN |
| | | | HPDAK |
| | | | GIETGSEDLEILPNGLAFISSGLKYPGIK |
| | | | HANWTLTPLK |
| | | | IFFYDSENPPASEVLR |
| | | | ILLMDLNEEDPTVLELGITGSK |
| | | | IQNILTEEPK |
| | | | IQNILTEEPKVTQVYAENGTVLQGSTVA |
| | | | SVYK |
| | | | IQNILTEEPKVTQVYAENGTVLQGSTVA |
| | | | SVYKGK |
| | | | LIALTLLGMGLALFR |
| | | | LLIGTVFHK |
| | | | LLPNLNDIVAVGPEHFYGTNDHYFLDPY |
| | | | LQSWEMYLGLAW |
| | | | SYVVYYSPSEVR |
| | | | NHQSSYQTR |
| | | | SFNPNSPGK |
| | | | SLDFNTLVDNISVDPETGDLWVGCHPN |
| | | | GMK |
| | | | STVELFK |
| | | | STVELFKFQEEEKSLLHLK |
| | | | STVELFKFQEEEKSLLHLK |
| | | | VTQVYAENGTVLQGSTVASVYK |
| | | | VTQVYAENGTVLQGSTVASVYKGK |
| | | | VVAEGFDFANGINISPDGK |
| | | | VVAEGFDFANGINISPDGKYVYIAELLA |
| | | | HK |
| | | | YVYIAELLAHK |
| | | | YVYIAELLAHKIHVYEK |
| Q15166 | PON3 | Serum | DHYFTNSLLSFFEMILDLR |
| | | paraoxonase/lactonase 3 | ELFNPHGISIFIDK |
| | | | EVEPVEPENCHLIEELESGSEDIDILPSG |
| | | | LAFISSGLK |
| | | | HDNWDLTQLK |
| | | | IFLMDLNEQNPR |
| | | | LLNYNPEDPPGSEVLR |
| | | | SVNDIVVLGPEQFYATR |
| | | | VIQLGTLVDNLTVDPATGDILAGCHPNP |
| | | | MK |
| | | | VSTVYANNGSVLQGTSVASVYHGK |
| | | | YPGMPNFAPDEPGK |
| | | | YVYVADVAAK |
| P04070 | PROC | Vitamin K-dependent | DTEDQEDQVDPR |
| | | protein C | EIFQNVDDTLAFWSK |
| | | | ELNQAGQETLVTGWGYHSSR |
| | | | EVFVHPNYSK |
| | | | EVSFLNCSLDNGGCTHYCLEEVGWR |
| | | | GDSPWQVVLLDSK |
| | | | HVDGDQCLVLPLEHPCASLCCGHGTCI |
| | | | DGIGSFSCDCR |
| | | | IPVVPHNECSEVMSNMVSENMLCAGIL |
| | | | GDR |
| | | | LACGAVLIHPSWVLTAAHCMDESK |
| | | | LACGAVLIHPSWVLTAAHCMDESKK |
| | | | LGDDLLQCHPAVK |
| | | | RGDSPWQVVLLDSK |
| | | | STTDNDIALLHLAQPATLSQTIVPICLPD |
| | | | SGLAER |
| | | | TFVLNFIK |
| | | | WELDLDIK |
| | | | YLDWIHGHIR |
| Q9UNN8 | PROCR | Endothelial protein C | ALWQADTQVTSGVVTFTLQQLNAYNR |
| | | receptor | CFLGCELPPEGSR |
| | | | DPYHVWYQGNASLGGHLTHVLEGPDT |
| | | | NTTIIQLQPLQEPE |
| | | | SWAR |
| | | | EFLEDTCVQYVQK |
| | | | LHMLQISYFR |
| | | | TLAFPLTIR |
| | | | TQSGLQSYLLQFHGLVR |
| P24158 | PRTN3 | Myeloblastin | AGICFGDSGGPLICDGIIQGIDSFVIWGC |
| | | | ATR |
| | | | GNPGSHFCGGTLIHPSFVLTAAHCLR |
| | | | LFPDFFTR |
| | | | LNDVLLIQLSSPANLSASVATVQLPQQD |
| | | | QPVPHGTQCLAMGWGR |
| | | | LVNVVLGAHNVR |
| | | | TQEPTQQHFSVAQVFLNNYDAENK |
| | | | VALYVDWIR |
| | | | VGAHDPPAQVLQELNVTVVTFFCR |
| | | | VGAHDPPAQVLQELNVTVVTFFCRPHN |
| | | | ICTFVPR |
| P23467 | PTPRB | Receptor-type tyrosine- | HANETSLSIMWQTPVAEWEK |
| | | protein phosphatase beta | HATSYAFHGLTPGYLYNLTVMTEAAGL |
| | | | QNYR |
| | | | IDNTTYGCNLQDLQAGTIYNFR |
| | | | LSNVDDDPCSDYINASYIPGNNFR |
| | | | LVNESLCLQK |
| | | | NRSTEDLHVTWSGANGDVDQYEIQLLF |
| | | | NDMK |
| | | | SALCLAISNSSR |
| | | | SFSVYTNGSTVPSPVK |
| | | | TIQNQQWMWTEDEK |
| | | | VTSYEVQLFDENNQK |
| | | | WQRPPGNVDSYNITLSHK |
| P15151 | PVR | Poliovirus receptor | HGESGSMAVFHQTQGPSYSESK |
| | | | LEFVAAR |
| | | | PINTTLICNVTNALGAR |
| | | | PVDKPINTTLICNVTNALGAR |
| | | | QAELTVQVK |
| | | | SNPEPTGYNWSTTMGPLPPFAVAQGA |
| | | | QLLIR |
| | | | VEDEGNYTCLFVTFPQGSR |
| | | | VEHESFEKPQLLTVNLTVYYPPEVSISG |
| | | | YDNNWYLGQNEATLTCDAR |
| Q92626 | PXDN | Peroxidasin homolog | ANEQLGLTSMHTLWFR |
| | | | DGQVTCFVEACPPATCAVPVNIPGACC |
| | | | PVCLQK |
| | | | FHISPEGFLTINDVGPADAGR |
| | | | ILCDNADNITR |
| | | | ISGVALHDQGQYECQAVNIIGSQK |
| | | | LDSNTLHCDCEILWLADLLK |
| | | | LSTTECVDAGGESHANNTK |
| | | | LWYENPGVFSPAQLTQIK |
| | | | LYGSTLNIDLFPALVVEDLVPGSR |
| | | | QGEHLSNSTSAFSTR |
| | | | TLQLIQEHVQHGLMVDLNGTSYHYNDL |
| | | | VSPQYLNLIANLSGCTAHRR |
| | | | VAEFPHGYGSCDEIPR |
| | | | VYCNLSAAHTFEDLK |
| O00391 | QSOX1 | Sulfhydryl oxidase 1 | AHFSPSNIILDFPAAGSAAR |
| | | | AWRPALYLAALDCAEETNSAVCR |
| | | | DCASHFEQMAAASMHR |
| | | | DFNIPGFPTVR |
| | | | DVQNVAAAPELAMGALELESR |
| | | | EVLPAIR |
| | | | FGVTDFPSCYLLFR |
| | | | FPVLEGQR |
| | | | GYVHYFFGCR |
| | | | IYMADLESALHYILR |
| | | | KFGVTDFPSCYLLFR |
| | | | LAGAPSEDPQFPK |
| | | | LDVPVWDVEATLNFLK |
| | | | LEEIDGFFAR |
| | | | LIDALESHHDTWPPACPPLEPAK |
| | | | LIDALESHHDTWPPACPPLEPAKLEEID |
| | | | GFFAR |
| | | | NGSGAVFPVAGADVQTLR |
| | | | NNEEYLALIFEK |
| | | | PALYLAALDCAEETNSAVCR |
| | | | PEMMKSPTNTTPHVPAEGPEASR |
| | | | PLVQNFLHSVNEWLK |
| | | | RDVQNVAAAPELAMGALELESR |
| | | | SALYSPSDPLTLLQADTVR |
| | | | SFYTAYLQR |
| | | | VGSPNAAVLWLWSSHNR |
| | | | VLNTEANVVR |
| | | | VNWIGCQGSEPHFR |
| | | | YFPGRPLVQNFLHSVNEWLK |
| P05451 | REG1A | Lithostathine-1-alpha | DVPCEDKFSFVCK |
| | | | ESGTDDFNVWIGLHDPK |
| | | | ETWVDADLYCQNMNSGNLVSVLTQAE |
| | | | GAFVASLIK |
| | | | SWGIGAPSSVNPGYCVSLTSSTGFQK |
| | | | SYCYYFNEDR |
| | | | ISCPEGTNAYR |
| | | | WHWSSGSLVSYK |
| P07998 | RNASE1 | Ribonuclease pancreatic | CKPVNTFVHEPLVDVQNVCFQEK |
| | | | HIIVACEGSPYVPVHFDASVEDST |
| | | | PVNTFVHEPLVDVQNVCFQEK |
| | | | SNSSMHITDCR |
| P10153 | RNASE2 | Non-secretory | DPPQYPVVPVHLDR |
| | | ribonuclease | NCHHSGSQVPLIHCNLTTPSPQNISNC |
| | | | R |
| | | | NQNTFLLTTFANVVNVCGNPNMTCPSN |
| | | | K |
| | | | RDPPQYPVVPVHLDR |
| | | | YAQTPANMFYIVACDNR |
| Q8WZ75 | ROBO4 | Roundabout homolog 4 | ARGPDSNVLLLR |
| | | | DMVAVVGEQFTLECGPPWGHPEPTVS |
| | | | WWK |
| | | | GHAHDGQALSTDLGVYTCEASNR |
| | | | GPDSNVLLLR |
| | | | IQLENVTLLNPDPAEGPK |
| | | | IQLENVTLLNPDPAEGPKPR |
| | | | LSVAVLR |
| | | | PAVWLSWK |
| | | | PDWLEDMEVSHTQR |
| | | | TQTAPGGQGAPWAEELLAGWQSAELG |
| | | | GLHWGQDYEFK |
| | | | VPSAPPQEVTLKPGNGTVFVSWVPPPA |
| | | | ENHNGIIR |
| | | | VSGPAAPAQSYTALFR |
| | | | VSIQEPQDYTEPVELLAVR |
| P0DJI8 | SAA1 | Serum amyloid A-1 | FFGHGAEDSLADQAANEWGR |
| | | protein | GPGGVWAAEAISDAR |
| | | | RGPGGVWAAEAISDAR |
| | | | RGPGGVWAAEAISDARENIQR |
| P0DJI9 | SAA2 | Serum amyloid A-2 | GAEDSLADQAANK |
| | | protein | GPGGAWAAEVISNAR |
| | | | GPGGAWAAEVISNARENIQR |
| | | | RGPGGAWAAEVISNAR |
| | | | RGPGGAWAAEVISNARENIQR |
| | | | AYSDMREANYIGSDKYFHAR |
| | | | DPNHFRPAGLPEK |
| | | | EANYIGSDK |
| | | | EANYIGSDKYFHAR |
| | | | PAGLPEKY |
| | | | RGPGGAWAAEVISNAR |
| | | | RGPGGAWAAEVISNARENIQR |
| | | | SFFSFLGEAFDGAR |
| P16581 | SELE | E-selectin | CEQIVNCTALESPEHGSLVCSHPLGNF |
| | | | SYNSSCSISCDR |
| | | | EEIEYLNSILSYSPSYYWIGIR |
| | | | FACPEGWTLNGSAAR |
| | | | GYMNCLPSASGSFR |
| | | | INMSCSGEPVFGTVCK |
| | | | KFVPASSCQSLESDGSYQK |
| | | | LALCYTAACTNTSCSGHGECVETINNY |
| | | | TCK |
| | | | LQCGPTGEWDNEKPTCEAVR |
| | | | SSCNFTCEEGFMLQGPAQVECTTQGQ |
| | | | WTQQIPVCEAFQCT |
| | | | ALSNPER |
| | | | VNNVWVWVGTQKPLTEEAK |
| | | | YGSSCEFSCEQGFVLK |
| P49908 | SEPP1 | Selenoprotein P | CGNCSLTTLKDEDFCK |
| | | | CINQLLCK |
| | | | CGNCSLTTLK |
| | | | CGNCSLTTLKDEDFCKR |
| | | | DDFLIYDR |
| | | | DMPASEDLQDLQK |
| | | | EGYSNISYIVVNHQGISSR |
| | | | KCGNCSLTTLKDEDFCK |
| | | | KEGYSNISYIVVNHQGISSR |
| | | | LPTDSELAPR |
| | | | LVYHLGLPFSFLTFPYVEEAIK |
| | | | QPPAWSIR |
| | | | VSEHIPVYQQEENQTDVWTLLNGSK |
| | | | VSEHIPVYQQEENQTDVWTLLNGSKDD |
| | | | FLIYDR |
| P01009 | SERPINA1 | Alpha-1-antitrypsin | ADTHDEILEGLNFNLTEIPEAQIHEGFQE |
| | | | LLR |
| | | | ADTHDEILEGLNFNLTEIPEAQIHEGFQE |
| | | | LLRTLNQPDSQ |
| | | | LQLTTGNGLFLSEGLK |
| | | | AVHKAVLTIDEKGTEAAGAMFLEAIPMS |
| | | | IPPEVK |
| | | | AVLTIDEK |
| | | | AVLTIDEKGTEAAGAMFLEAIPMSIPP |
| | | | EVK |
| | | | DTEEEDFHVDQVTTVK |
| | | | DTEEEDFHVDQVTTVKVPMMK |
| | | | DTVFALVNYIFFK |
| | | | DTVFALVNYIFFKGK |
| | | | ELDRDTVFALVNYIFFK |
| | | | ELDRDTVFALVNYIFFKGK |
| | | | FLEDVK |
| | | | FLEDVKK |
| | | | FLENEDR |
| | | | FLENEDRR |
| | | | FNKPFVFLMIEQNTK |
| | | | FNKPFVFLMIEQNTKSPLFMGK |
| | | | GKWERPFEVK |
| | | | GTEAAGAMFLEAIPMSIPPEVK |
| | | | ITPNLAEFAFSLYR |
| | | | ITPNLAEFAFSLYRQLAHQSNSTNIFFSP |
| | | | VSIATAFAMLSLGTK |
| | | | IVDLVKELDR |
| | | | IVDLVKELDRDTVFALVNYIFFK |
| | | | KLSSWVLLMK |
| | | | KLYHSEAFTVNFGDTEEAK |
| | | | KLYHSEAFTVNFGDTEEAKK |
| | | | KQINDYVEK |
| | | | LGMFNIQHCK |
| | | | LQHLENELTHDIITK |
| | | | LQHLENELTHDIITKFLENEDR |
| | | | LQHLENELTHDIITKFLENEDRR |
| | | | LSITGTYDLK |
| | | | LSITGTYDLKSVLGQLGITK |
| | | | LSSWVLLMK |
| | | | LSSWVLLMKYLGNATAIFFLPDEGK |
| | | | LVDKFLEDVK |
| | | | LVDKFLEDVKK |
| | | | LYHSEAFTVNFGDTEEAK |
| | | | LYHSEAFTVNFGDTEEAKK |
| | | | LYHSEAFTVNFGDTEEAKKQINDYVEK |
| | | | PFEVKDTEEEDFHVDQVTTVK |
| | | | PFVFLMIEQNTK |
| | | | QINDYVEK |
| | | | QLAHQSNSTNIFFSPVSIATAFAMLSLG |
| | | | TK |
| | | | QLAHQSNSTNIFFSPVSIATAFAMLSLG |
| | | | TKADTHDEILEG |
| | | | LNFNLTEIPEAQIHEGFQELLR |
| | | | RLGMFNIQHCK |
| | | | SASLHLPK |
| | | | SASLHLPKLSITGTYDLK |
| | | | SPLFMGK |
| | | | SVLGQLGITK |
| | | | SVLGQLGITKVFSNGADLSGVTEEAPLK |
| | | | SVLGQLGITKVFSNGADLSGVTEEAPLK |
| | | | LSK |
| | | | TDTSHHDQDHPTFNK |
| | | | TDTSHHDQDHPTFNKITPNLAEFAFS |
| | | | LYR |
| | | | TLNQPDSQLQLTTGNGLFLSEGLK |
| | | | TLNQPDSQLQLTTGNGLFLSEGLKL |
| | | | VDK |
| | | | TLNQPDSQLQLTTGNGLFLSEGLKLVD |
| | | | KFLEDVK |
| | | | VFSNGADLSGVTEEAPLK |
| | | | VFSNGADLSGVTEEAPLKLSK |
| | | | VFSNGADLSGVTEEAPLKLSKAVHK |
| | | | WERPFEVKDTEEEDFHVDQVTTVK |
| | | | YLGNATAIFFLPDEGK |
| | | | YLGNATAIFFLPDEGKLQHLENELTHDII |
| | | | TK |
| | | | VVNPTQK |
| Q9UK55 | SERPINA10 | Protein Z-dependent | ETFFNLSK |
| | | protease inhibitor | ETSNFGFSLLR |
| | | | FASTFDK |
| | | | GLHLQALKPTKPGLLPSLFK |
| | | | GTEAVAGILSEITAYSMPPVIK |
| | | | HDGNMVFSPFGMSLAMTGLMLGATGP |
| | | | TETQIK |
| | | | IFSPFADLSELSATGR |
| | | | LFDEINPETK |
| | | | LILVDYILFK |
| | | | LPYQGNATMLVVLMEK |
| | | | MGDHLALEDYLTTDLVETWLR |
| | | | NLELGLTQGSFAFIHK |
| | | | NLELGLTQGSFAFIHKDFDVK |
| | | | NMEVFFPK |
| | | | PGLLPSLFK |
| | | | PTKPGLLPSLFK |
| | | | TVIEVDER |
| | | | VDRPFHFMIYEETSGMLLFLGR |
| | | | VVNPTLL |
| | | | WLTPFDPVFTEVDTFHLDK |
| | | | WLTPFDPVFTEVDTFHLDKYK |
| | | | YEMHELLR |
| | | | YFDTECVPMNFR |
| P01011 | SERPINA3 | Alpha-1-antichymotrypsin | ADLSGITGAR |
| | | | ADLSGITGARNLAVSQVVHK |
| | | | AKWEMPFDPQDTHQSR |
| | | | APDKNVIFSPLSISTALAFLSLGAHNTTL |
| | | | TEILK |
| | | | AVLDVFEEGTEASAATAVK |
| | | | DEELSCTVVELK |
| | | | DEELSCTVVELKYTGNASALFILPDQDK |
| | | | DEELSCTVVELKYTGNASALFILPDQDK |
| | | | MEEVEAMLLPETLK |
| | | | DLDSQTMMVLVNYIFFK |
| | | | DLDSQTMMVLVNYIFFKAK |
| | | | DSLEFR |
| | | | DSLEFREIGELYLPK |
| | | | DYNLNDILLQLGIEEAFTSK |
| | | | DYNLNDILLQLGIEEAFTSKADLSGIT |
| | | | GAR |
| | | | EIGELYLPK |
| | | | EIGELYLPKFSISR |
| | | | EQLSLLDR |
| | | | EQLSLLDRFTEDAK |
| | | | EQLSLLDRFTEDAKR |
| | | | FNLTETSEAEIHQSFQHLLR |
| | | | FNRPFLMIIVPTDTQNIFFMSK |
| | | | FSISRDYNLNDILLQLGIEEAFTSK |
| | | | GKITDLIKDLDSQTMMVLVNYIFFK |
| | | | GLKFNLTETSEAEIHQSFQHLLR |
| | | | GLKFNLTETSEAEIHQSFQHLLRTLNQS |
| | | | SDELQLSMGNAMFVK |
| | | | GTHVDLGLASANVDFAFSLYK |
| | | | ITDLIKDLDSQTMMVLVNYIFFK |
| | | | ITLLSALVETR |
| | | | KWVMVPMMSLHHLTIPYFR |
| | | | KWVMVPMMSLHHLTIPYFRDEELSCTV |
| | | | VELK |
| | | | LINDYVK |
| | | | LYGSEAFATDFQDSAAAK |
| | | | LYGSEAFATDFQDSAAAKK |
| | | | MEEVEAMLLPETLK |
| | | | MEEVEAMLLPETLKR |
| | | | NLAVSQVVHK |
| | | | NLAVSQVVHKAVLDVFEEGTEASAATA |
| | | | VK |
| | | | NVIFSPLSISTALAFLSLGAHNTTLTEILK |
| | | | PFLMIIVPTDTQNIFFMSK |
| | | | RLYGSEAFATDFQDSAAAK |
| | | | RLYGSEAFATDFQDSAAAKK |
| | | | TLNQSSDELQLSMGNAMFVK |
| | | | TLNQSSDELQLSMGNAMFVKEQLSL |
| | | | LDR |
| | | | TLNQSSDELQLSMGNAMFVKEQLSLLD |
| | | | RFTEDAK |
| | | | WEMPFDPQDTHQSR |
| | | | WRDSLEFR |
| | | | WRDSLEFREIGELYLPK |
| | | | WVMVPMMSLHHLTIPYFR |
| | | | WVMVPMMSLHHLTIPYFRDEELSCTVV |
| | | | ELK |
| | | | YTGNASALFILPDQDK |
| | | | YTGNASALFILPDQDKMEEVEAMLLPET |
| | | | LK |
| | | | YTGNASALFILPDQDKMEEVEAMLLPET |
| | | | LKR |
| P29622 | SERPINA4 | Kallistatin | ALWEKPFISSR |
| | | | ATLDVDEAGTEAAAATSFAIK |
| | | | DFYVDENTTVR |
| | | | DVLMVLVNYIYFK |
| | | | EIEEVLTPEMLMR |
| | | | FFSAQTNR |
| | | | FLNDTMAVYEAK |
| | | | FSISGSYVLDQILPR |
| | | | FYYLIASETPGK |
| | | | GDATVFFILPNQGK |
| | | | GFQHLLHTLNLPGHGLETR |
| | | | IAPANADFAFR |
| | | | IVDLVSELK |
| | | | IVDLVSELKK |
| | | | KDVLMVLVNYIYFK |
| | | | LFHTNFYDTVGTIQLINDHVK |
| | | | LFHTNFYDTVGTIQLINDHVKK |
| | | | LGFTDLFSK |
| | | | MDYKGDATVFFILPNQGK |
| | | | MREIEEVLTPEMLMR |
| | | | NIFFSPLSISAAYAMLSLGACSHSR |
| | | | SQILEGLGFNLTELSESDVHR |
| | | | TTPKDFYVDENTTVR |
| | | | VGSALFLSHNLK |
| | | | VPMMLQDQEHHWYLHDR |
| | | | WADLSGITK |
| | | | WNNLLR |
| | | | YLPCSVLR |
| P05154 | SERPINA5 | Plasma serine protease | AAAATGTIFTFR |
| | | inhibitor | ALASAAPSQSIFFSPVSISMSLAMLSLG |
| | | | AGSSTK |
| | | | AVVEVDESGTR |
| | | | DFTFDLYR |
| | | | DGFQLSLGNALFTDLVVDLQDTFVS |
| | | | AMK |
| | | | EDQYHYLLDR |
| | | | EDQYHYLLDRNLSCR |
| | | | FSIEGSYQLEK |
| | | | GFQQLLQELNQPR |
| | | | GTQEQDFYVTSETVVR |
| | | | LVFNRPFLMFIVDNNILFLGK |
| | | | MQILEGLGLNLQK |
| | | | NLDSNAVVIMVNYIFFK |
| | | | QLELYLPK |
| | | | RDFTFDLYR |
| | | | TLYLADTFPTNFR |
| | | | VLPSLGISNVFTSHADLSGISNHSNIQVS |
| | | | EMVHK |
| | | | VVGVPYQGNATALFILPSEGK |
| P01008 | SERPINC1 | Antithrombin-III | ADGESCSASMMYQEGK |
| | | | AFLEVNEEGSEAAASTAVVIAGR |
| | | | ANRPFLVFIR |
| | | | ATEDEGSEQK |
| | | | ATEDEGSEQKIPEATNR |
| | | | DDLYVSDAFHK |
| | | | DIPMNPMCIYR |
| | | | ELFYKADGESCSASMMYQEGK |
| | | | ELTPEVLQEWLDELEEMMLVVHMPR |
| | | | ENAEQSRAAINK |
| | | | EQLQDMGLVDLFSPEK |
| | | | EVPLNTIIFMGR |
| | | | FATTFYQHLADSK |
| | | | FATTFYQHLADSKNDNDNIFLSPLSISTA |
| | | | FAMTK |
| | | | FDTISEK |
| | | | FDTISEKTSDQIHFFFAK |
| | | | FRIEDGFSLK |
| | | | FRIEDGFSLKEQLQDMGLVDLFSPEK |
| | | | GDDITMVLILPK |
| | | | GDDITMVLILPKPEK |
| | | | IEDGFSLK |
| | | | IEDGFSLKEQLQDMGLVDLFSPEK |
| | | | IPEATNR |
| | | | ITDVIPSEAINELTVLVLVNTIYFK |
| | | | KATEDEGSEQK |
| | | | KELFYKADGESCSASMMYQEGK |
| | | | LFGDKSLTFNETYQDISELVYGAK |
| | | | LGACNDTLQQLMEVFK |
| | | | LGACNDTLQQLMEVFKFDTISEK |
| | | | LGACNDTLQQLMEVFKFDTISEKTSDQI |
| | | | HFFFAK |
| | | | LPGIVAEGR |
| | | | LPGIVAEGRDDLYVSDAFHK |
| | | | LQPLDFK |
| | | | LQPLDFKENAEQSR |
| | | | LVSANRLFGDKSLTFNETYQDISELVYG |
| | | | AK |
| | | | NDNDNIFLSPLSISTAFAMTK |
| | | | NDNDNIFLSPLSISTAFAMTKLGACNDT |
| | | | LQQLMEVFK |
| | | | PFLVFIR |
| | | | RVAEGTQVLELPFK |
| | | | SKLPGIVAEGR |
| | | | SKLPGIVAEGRDDLYVSDAFHK |
| | | | SLAKVEKELTPEVLQEWLDELEEMMLV |
| | | | VHMPR |
| | | | SLTFNETYQDISELVYGAK |
| | | | TSDQIHFFFAK |
| | | | VAEGTQVLELPFK |
| | | | VAEGTQVLELPFKGDDITMVLILPK |
| | | | VAEGTQVLELPFKGDDITMVLILPKPEK |
| | | | VEKELTPEVLQEWLDELEEMMLVVHM |
| | | | PR |
| | | | VWELSK |
| P05546 | SERPIND1 | Heparin cofactor 2 | DALENIDPATQMMILNCIYFK |
| | | | DFVNASSK |
| | | | DFVNASSKYEITTIHNLFR |
| | | | DFVNASSKYEITTIHNLFRK |
| | | | DQVNTFDNIFIAPVGISTAMGMISLGLK |
| | | | ENTVTNDWIPEGEEDDDYLDLEK |
| | | | EYYFAEAQIADFSDPAFISK |
| | | | FAFNLYR |
| | | | FPVEMTHNHNFR |
| | | | FTVDRPFLFLIYEHR |
| | | | GETHEQVHSILHFK |
| | | | GETHEQVHSILHFKDFVNASSK |
| | | | GETHEQVHSILHFKDFVNASSKYEITTIH |
| | | | NLFR |
| | | | GGETAQSADPQWEQLNNK |
| | | | GGETAQSADPQWEQLNNKNLSMPLLP |
| | | | ADFHK |
| | | | GNFLAANDQELDCDILQLEYVGGISMLI |
| | | | VVPHK |
| | | | GPLDQLEK |
| | | | HQGTITVNEEGTQATTVTTVGFMPLST |
| | | | QVR |
| | | | IAIDLFK |
| | | | IFSEDDDYIDIVDSLSVSPTDSDVSAGNI |
| | | | LQLFHGK |
| | | | LNILNAK |
| | | | NFGYTLR |
| | | | NGNMAGISDQR |
| | | | NLSMPLLPADFHK |
| | | | NYNLVESLK |
| | | | PFLFLIYEHR |
| | | | QFPILLDFK |
| | | | SVNDLYIQK |
| | | | TLEAQLTPR |
| | | | TSCLLFMGR |
| | | | VLKDQVNTFDNIFIAPVGISTAMGMISLG |
| | | | LK |
| | | | VREYYFAEAQIADFSDPAFISK |
| | | | YEITTIHNLFR |
| P05155 | SERPING1 | Plasma protease C1 | AKVGQLQLSHNLSLVILVPQNLK |
| | | inhibitor | ASSNPNATSSSSQDPESLQDR |
| | | | DFTCVHQALK |
| | | | DFTCVHQALKGFTTK |
| | | | DTFVNASR |
| | | | DTFVNASRTLYSSSPR |
| | | | FPVFMGR |
| | | | FQPTLLTLPR |
| | | | GVTSVSQIFHSPDLAIR |
| | | | GVTSVSQIFHSPDLAIRDTFVNASR |
| | | | HRLEDMEQALSPSVFK |
| | | | IKVTTSQDMLSIMEK |
| | | | KVETNMAFSPFSIASLLTQVLLGAGE |
| | | | NTK |
| | | | KYPVAHFIDQTLK |
| | | | LEDMEQALSPSVFK |
| | | | LEFFDFSYDLNLCGLTEDPDLQVSAMQ |
| | | | HQTVLELTETGVEAAAASAISVAR |
| | | | LEMSKFQPTLLTLPR |
| | | | LLDSLPSDTR |
| | | | LLDSLPSDTRLVLLNAIYLSAK |
| | | | LVLLNAIYLSAK |
| | | | LYHAFSAMK |
| | | | MEPFHFK |
| | | | MLFVEPILEVSSLPTTNSTTNSATK |
| | | | NSVIKVPMMNSK |
| | | | TLLVFEVQQPFLFVLWDQQHK |
| | | | TLLVFEVQQPFLFVLWDQQHKFPVF |
| | | | MGR |
| | | | TLYSSSPR |
| | | | TLYSSSPRVLSNNSDANLELINTWVAK |
| | | | TNLESILSYPK |
| | | | TNLESILSYPKDFTCVHQALK |
| | | | VETNMAFSPFSIASLLTQVLLGAGENTK |
| | | | VGQLQLSHNLSLVILVPQNLK |
| | | | VLSNNSDANLELINTWVAK |
| | | | VLSNNSDANLELINTWVAKNTNNK |
| | | | VTTSQDMLSIMEK |
| | | | YPVAHFIDQTLK |
| Q08ET2 | SIGLEC14 | Sialic acid-binding lg-like | ALNPSQTSMSGTLELPNIGAR |
| | | lectin 14 | DGEIPYYAEVVATNNPDR |
| | | | LNLEVTALIEKPDIHFLEPLESGR |
| | | | LSCSLPGSCEAGPPLTFSWTGNALSPL |
| | | | DPETTR |
| | | | MEDTGSYFFR |
| | | | NCSLSIGDAR |
| | | | SSELTLTPRPEDHGTNLTCQVK |
| | | | SWYSSPPLYVYWFR |
| P78324 | SIRPA | Tyrosine-protein | CTATSLIPVGPIQWFR |
| | | phosphatase non- | IGNITPADAGTYYCVK |
| | | receptor type substrate 1 | AENQVNVTCQVR |
| | | | DGTYNWMSWLLVNVSAHR |
| | | | GTANLSETIR |
| | | | LQLTWLENGNVSR |
| P10451 | SPP1 | Osteopontin | AIPVAQDLNAPSDWDSR |
| | | | EFHSHEFHSHEDMLVVDPK |
| | | | GDSVVYGLR |
| | | | ISHELDSASSEVN |
| | | | QNLLAPQNAVSSEETNDFK |
| | | | QNLLAPQNAVSSEETNDFKQETLPSK |
| | | | RPDIQYPDATDEDITSHMESEELNG |
| | | | AYK |
| | | | YPDAVATWLNPDPSQK |
| Q4LDE5 | SVEP1 | Sushi, von Willebrand | ALHEDLPSGSFIQDDMVHCSYLCDEGK |
| | | factor type A, EGF and | APPACHLVFCGEPPAIK |
| | | pentraxin domain- | CALLLQEIPAISYR |
| | | containing protein 1 | CLEGYTMDTDTDTFTCQK |
| | | | CLPSQQWNDSFPVCK |
| | | | CLSNGSWSGSSPSCLPCR |
| | | | CMEGFVLNTSAK |
| | | | CPLPENITHILVHGDDFSVNR |
| | | | CSTPVIEYGTVNGTDFDCGK |
| | | | CVAPYQCDCPPGWTGSR |
| | | | DAVITGNNFTFR |
| | | | EEHCYLLHSFEEFEALAR |
| | | | EFYVDQNVSIK |
| | | | EGFLLQGHGIITCNPDETWTQTSAK |
| | | | EIEYTCNEGFLLEGAR |
| | | | ESSCLANSSWSHSPPVCEPVK |
| | | | FAAGSVVSFK |
| | | | FSEAFETTLGK |
| | | | GAFQQAAQILLHAR |
| | | | GAVNISACGVPCPEGK |
| | | | GEGFSPAESFVGSISQLNLWDYVLSPQ |
| | | | QVK |
| | | | GNVLAWPDFLSGIVGK |
| | | | GSNYTYLSTLYYECDPGYVLNGTER |
| | | | GSPCEIPFTPVNGDFICTPDNTGVNCTL |
| | | | TCLEGYDFTEGSTDK |
| | | | GVWSQPYPVCEPLSCGSPPSVANAVA |
| | | | TGEAHTYESEVK |
| | | | GYTLAGDKESSCLANSSWSHSPPVCE |
| | | | PVK |
| | | | IGSYQDEEGQLECK |
| | | | ISCGPPAHVENAIAR |
| | | | KCPLPENITHILVHGDDFSVNR |
| | | | LIFNITASVPLPDER |
| | | | LIFNITASVPLPDERNDTLEWENQQR |
| | | | LLQTLETITNK |
| | | | LLSDFPVVPTATR |
| | | | MCVNCPLGTYYNLEHFTCESCR |
| | | | MVPSFCSDAEDIDCR |
| | | | NWDEDEPICIPVDCSSPPVSANGQVR |
| | | | PGFELVGNTTTLCGENGHWLGGK |
| | | | SDQQCLAVSCDEPPIVDHASPETAHR |
| | | | SGYVIQGSSDLICTEK |
| | | | SHTQGDLFPQGETIVQYTATDPSGNNR |
| | | | SVCLENGTWTSPPICR |
| | | | TLEQQDSANVTWQIPTAK |
| | | | VCLANGSWSGATPDCVPVR |
| | | | VIDAEPPVIDWCR |
| | | | YYCAYEDGVWKPTYTTEWPDCAK |
| P02787 | TF | Serotransferrin | ADRDQYELLCLDNTR |
| | | | ADRDQYELLCLDNTRK |
| | | | AIAANEADAVTLDAGLVYDAYLAPNNLK |
| | | | AIAANEADAVTLDAGLVYDAYLAPNNLK |
| | | | PVVAEFYGSK |
| | | | AIAANEADAVTLDAGLVYDAYLAPNNLK |
| | | | PVVAEFYGSKED |
| | | | PQTFYYAVAVVK |
| | | | APNHAVVTR |
| | | | ASYLDCIR |
| | | | AVANFFSGSCAPCADGTDFPQLCQLCP |
| | | | GCGCSTLNQYFGYSGAFK |
| | | | AVGNLRKCSTSSLLEACTFR |
| | | | CDEWSVNSVGK |
| | | | CDEWSVNSVGKIECVSAETTEDCIAK |
| | | | CGLVPVLAENYNK |
| | | | CLKDGAGDVAFVK |
| | | | CLVEKGDVAFVK |
| | | | CSTSSLLEACTFR |
| | | | DCHLAQVPSHTVVAR |
| | | | DDTVCLAK |
| | | | DGAGDVAFVK |
| | | | DGAGDVAFVKHSTIFENLANK |
| | | | DHMKSVIPSDGPSVACVK |
| | | | DLLFKDSAHGFLK |
| | | | DLLFRDDTVCLAK |
| | | | DQYELLCLDNTR |
| | | | DSAHGFLK |
| | | | DSGFQMNQLR |
| | | | DYELLCLDGTR |
| | | | DYELLCLDGTRK |
| | | | DYELLCLDGTRKPVEEYANCHLAR |
| | | | EDLIWELLNQAQEHFGK |
| | | | EDLIWELLNQAQEHFGKDK |
| | | | EDPQTFYYAVAVVK |
| | | | EDPQTFYYAVAVVKK |
| | | | EFQLFSSPHGK |
| | | | EFQLFSSPHGKDLLFK |
| | | | EFQLFSSPHGKDLLFKDSAHGFLK |
| | | | EGTCPEAPTDECK |
| | | | EGTCPEAPTDECKPVK |
| | | | EGTCPEAPTDECKPVKWCALSHHER |
| | | | EGYYGYTGAFR |
| | | | FDEFFSEGCAPGSK |
| | | | FDEFFSEGCAPGSKK |
| | | | FDEFFSEGCAPGSKKDSSLCK |
| | | | GDVAFVK |
| | | | HQTVPQNTGGK |
| | | | HSTIFENLANK |
| | | | HSTIFENLANKADR |
| | | | HSTIFENLANKADRDQYELLCLDNTR |
| | | | IECVSAETTEDCIAK |
| | | | ILRQQQHLFGSNVTDCSGNFCLFR |
| | | | IMNGEADAMSLDGGFVYIAGK |
| | | | IMNGEADAMSLDGGFVYIAGKCGLVPV |
| | | | LAENYNK |
| | | | INHCRFDEFFSEGCAPGSK |
| | | | INHCRFDEFFSEGCAPGSKK |
| | | | KASYLDCIR |
| | | | KCSTSSLLEACTFR |
| | | | KDSGFQMNQLR |
| | | | KPVDEYKDCHLAQVPSHTVVAR |
| | | | KPVEEYANCHLAR |
| | | | KSASDLTWDNLK |
| | | | LCMGSGLNLCEPNNK |
| | | | LCMGSGLNLCEPNNKEGYYGYTGAFR |
| | | | LHDRNTYEKYLGEEYVK |
| | | | LKCDEWSVNSVGK |
| | | | LKCDEWSVNSVGKIECVSAETTEDCIAK |
| | | | MYLGYEYVTAIR |
| | | | MYLGYEYVTAIRNLR |
| | | | NLNEKDYELLCLDGTR |
| | | | NLNEKDYELLCLDGTRK |
| | | | NPDPWAK |
| | | | NPDPWAKNLNEK |
| | | | NTYEKYLGEEYVK |
| | | | PVDEYKDCHLAQVPSHTVVAR |
| | | | PVEEYANCHLAR |
| | | | PVVAEFYGSK |
| | | | QQQHLFGSNVTDCSGNFCLFR |
| | | | QQQHLFGSNVTDCSGNFCLFRSETK |
| | | | SAGWNIPIGLLYCDLPEPR |
| | | | SAGWNIPIGLLYCDLPEPRK |
| | | | SASDLTWDNLK |
| | | | SCHTAVGR |
| | | | SCHTGLGRSAGWNIPIGLLYCDLPEPR |
| | | | SDNCEDTPEAGYFAIAVVK |
| | | | SETKDLLFRDDTVCLAK |
| | | | SKEFQLFSSPHGK |
| | | | SKEFQLFSSPHGKDLLFK |
| | | | SMGGKEDLIWELLNQAQEHFGK |
| | | | SMGGKEDLIWELLNQAQEHFGKDK |
| | | | SVIPSDGPSVACVK |
| | | | SVIPSDGPSVACVKK |
| | | | TAGWNIPMGLLYNK |
| | | | TAGWNIPMGLLYNKINHCR |
| | | | WCALSHHER |
| | | | WCAVSEHEATK |
| | | | WCAVSEHEATKCQSFR |
| | | | YLGEEYVK |
| P01033 | TIMP1 | Metalloproteinase | AKFVGTPEVNQTTLYQR |
| | | inhibitor 1 | EPGLCTWQSLR |
| | | | FVGTPEVNQTTLYQR |
| | | | FVYTPAMESVCGYFHR |
| | | | FVYTPAMESVCGYFHRSHNRSEEFLIA |
| | | | GK |
| | | | GFQALGDAADIR |
| | | | LQDGLLHITTCSFVAPWNSLSLAQR |
| | | | LQSGTHCLWTDQLLQGSEK |
| | | | SEEFLIAGK |
| | | | SHNRSEEFLIAGK |
| | | | TYTVGCEECTVFPCLSIPCK |
| P24821 | TNC | Tenascin | AGTPYTVTLHGEVR |
| | | | ASTAKEPEIGNLNVSDITPESFNLSWMA |
| | | | TDGIFETFTIEI |
| | | | IDSNRLLETVEYNISGAER |
| | | | ASTEQAPELENLTVTEVGWDGLR |
| | | | AVDIPGLEAATPYR |
| | | | CEEGQCVCDEGFAGVDCSEK |
| | | | CICNEGYSGEDCSEVSPPK |
| | | | CINGTCYCEEGFTGEDCGK |
| | | | CVENECVCDEGFTGEDCSELICPNDCF |
| | | | DR |
| | | | CVNGQCVCDEGYTGEDCSQLR |
| | | | DHGETAFAVYDK |
| | | | DLAPPSEPSESFQEHTVDGENQIVFTH |
| | | | R |
| | | | DVTDTTALITWFK |
| | | | DVTDTTALITWFKPLAEIDGIELTYGIK |
| | | | EATEYEIELYGISK |
| | | | EDKESNPATINAATELDTPK |
| | | | EEFWLGLDNLNK |
| | | | EPEIGNLNVSDITPESFNLSWMATDGIF |
| | | | ETFTIEIIDSNR |
| | | | ESNPATINAATELDTPK |
| | | | ETFTTGLDAPR |
| | | | ETSVEVEWDPLDIAFETWEIIFR |
| | | | EVIVGPDTTSYSLADLSPSTHYTAK |
| | | | GFEESEPVSGSFTTALDGPSGLVTANIT |
| | | | DSEALAR |
| | | | GHSTRPLAVEVVTEDLPQLGDLAVSEV |
| | | | GWDGLR |
| | | | GLEPGQEYNVLLTAEK |
| | | | GNFSTEGCGCVCEPGWK |
| | | | GVTQDFSTTPLSVEVLTEEVPDMGNLT |
| | | | VTEVSWDALR |
| | | | ITAQGQYELR |
| | | | ITYVPITGGTPSMVTVDGTK |
| | | | KQSEPLEITLLAPER |
| | | | LDAPSQIEVK |
| | | | LEELENLVSSLR |
| | | | LIPGVEYLVSIIAMK |
| | | | LLDPQEFTLSGTQR |
| | | | LLETVEYNISGAER |
| | | | LNWTAADNAYEHFVIQVQEVNK |
| | | | LNWTAADQAYEHFIIQVQEANK |
| | | | LNYSLPTGQWVGVQLPR |
| | | | LPVGSQCSVDLESASGEK |
| | | | LSWTADEGVFDNFVLK |
| | | | NLTVPGSLR |
| | | | PLAEIDGIELTYGIK |
| | | | PLAVEVVTEDLPQLGDLAVSEVGWD |
| | | | GLR |
| | | | QSGVNATLPEENQPVVFNHVYNIK |
| | | | QTGLAPGQEYEISLHIVK |
| | | | SFSTFDKDTDSAITNCALSYK |
| | | | SNMIQTIFTTIGLLYPFPK |
| | | | SQTVSAIATTAMGSPK |
| | | | TAHISGLPPSTDFIVYLSGLAPSIR |
| | | | TISATATTEAEPEVDNLLVSDATPDGFR |
| | | | TPVLSAEASTGETPNLGEVVVAEVGWD |
| | | | ALK |
| | | | TTIDLTEDENQYSIGNLKPDTEYEVSL |
| | | | ISR |
| | | | TTLTGLRPGTEYGIGVSAVK |
| | | | TVSGNTVEYALTDLEPATEYTLR |
| | | | VATYLPAPEGLK |
| | | | VEAAQNLTLPGSLR |
| | | | VPGDQTSTIIQELEPGVEYFIR |
| | | | VSQTDNSITLEWR |
| | | | VTEYLVVYTPTHEGGLEMQFR |
| | | | WQPAIATVDSYVISYTGEK |
| | | | YAPISGGDHAEVDVPK |
| | | | YGDNNHSQGVNWFHWK |
| P20333 | TNFRSF1B | Tumor necrosis factor | GTQGPEQQHLLITAPSSSSSSLESSAS |
| | | receptor superfamily | ALDR |
| | | member 1B | PGTETSDVVCKPCAPGTFSNTTSSTDI |
| | | | CR |
| | | | PGTETSDVVCKPCAPGTFSNTTSSTDI |
| | | | CRPHQICNVVAIP |
| | | | GNASMDAVCTSTSPTR |
| P02766 | TTR | Transthyretin | AADDTWEPFASGK |
| | | | AADDTWEPFASGKTSESGELHGLTTEE |
| | | | EFVEGIYK |
| | | | ALGISPFHEHAEVVFTANDSGPR |
| | | | ALGISPFHEHAEVVFTANDSGPRR |
| | | | GSPAINVAVHVFR |
| | | | KAADDTWEPFASGK |
| | | | RYTIAALLSPYSYSTTAVVTNPK |
| | | | RYTIAALLSPYSYSTTAVVTNPKE |
| | | | TSESGELHGLTTEEEFVEGIYK |
| | | | TSESGELHGLTTEEEFVEGIYKVEIDTK |
| | | | YTIAALLSPYSYSTTAVVTNPK |
| | | | YTIAALLSPYSYSTTAVVTNPKE |
| P19320 | VCAM1 | Vascular cell adhesion | CSVADVYPFDR |
| | | protein 1 | DPEIEMSGGLVNGSSVTVSCK |
| | | | DPEIHLSGPLEAGK |
| | | | DPEIHLSGPLEAGKPITVK |
| | | | DTTVLVSPSSILEEGSSVNMTCLSQGFP |
| | | | APK |
| | | | EGDTVIISCTCGNVPETWIILK |
| | | | ELQVYISPK |
| | | | EVELIIQVTPK |
| | | | EVELIVQEKPFTVEISPGPR |
| | | | EVELIVQEK |
| | | | EVELIVQEKPFTVEISPGPR |
| | | | GETILENIEFLEDTDMK |
| | | | GIQVEIYSFPK |
| | | | GIQVELYSFPR |
| | | | GIQVELYSFPRDPEIEMSGGLVNGSSV |
| | | | TVSCK |
| | | | KLDNGNLQHLSGNATLTLIAMR |
| | | | LDNGNLQHLSGNATLTLIAMR |
| | | | LEIDLLK |
| | | | LEIELLK |
| | | | LHIDDMEFEPK |
| | | | LHIDEMDSVPTVR |
| | | | LQEGGSVTMTCSSEGLPAPEIFWSK |
| | | | MEDSGIYVCEGVNLIGK |
| | | | MEDSGVYLCEGINQAGR |
| | | | NTVISVNPSTK |
| | | | PFTVEISPGPR |
| | | | QLPNGELQPLSENATLTLISTK |
| | | | QSTQTLYVNVAPR |
| | | | SEGTNSTLTLSPVSFENEHSYLCTVTC |
| | | | GHK |
| | | | SLEMTFIPTIEDTGK |
| | | | SLEVTFTPVIEDIGK |
| | | | SLTLDVQGR |
| | | | SQEFLEDADR |
| | | | VPSVYPLDR |
| | | | VRSEGTNSTLTLSPVSFENEHSYLCTVT |
| | | | CGHK |
| | | | VTNEGTTSTLTMNPVSFGNEHSYLCTA |
| | | | TCESR |
| | | | YLAQIGDSVSLTCSTTGCESPFFSWR |
| Q9Y279 | VSIG4 | V-set and | GDVNLPCTYDPLQGYTQVLVK |
| | | immunoglobulin domain- | GSDPVTIFLR |
| | | containing protein 4 | GSPPISYIWYK |
| | | | ISLQCQAR |
| | | | LSVSKPTVTTGSGYGFTVPQGMR |
| | | | PAVIADSGSYFCTAK |
| | | | PTVTTGSGYGFTVPQGMR |
| | | | SHYTCEVTWQTPDGNQVVR |
| | | | VATLSTLLFK |
| | | | VPGDVSLQLSTLEMDDR |
| P04275 | VWF | von Willebrand factor | AFVLSSVDELEQQR |
| | | | AFVVDMMER |
| | | | AHLLSLVDVMQR |
| | | | ALSVVWDR |
| | | | AMYSIDINDVQDQCSCCSPTR |
| | | | APTCGLCEVAR |
| | | | AVSPLPYLR |
| | | | AVVILVTDVSVDSVDAAADAAR |
| | | | CHPLVDPEPFVALCEK |
| | | | CLPSACEVVTGSPR |
| | | | CLPTACTIQLR |
| | | | CMVQVGVISGFK |
| | | | CVDGCSCPEGQLLDEGLCVESTECPC |
| | | | VHSGK |
| | | | DCQDHSFSIVIETVQCADDR |
| | | | DCQDHSFSIVIETVQCADDRDAVCTR |
| | | | DETHFEVVESGR |
| | | | DETLQDGCDTHFCK |
| | | | DGTVTTDWK |
| | | | EAPDLVLQR |
| | | | ECLCGALASYAAACAGR |
| | | | EEVFIQQR |
| | | | EFMEEVIQR |
| | | | EGGPSQIGDALGFAVR |
| | | | ENGYECEWR |
| | | | EQAPNLVYMVTGNPASDEIK |
| | | | EQAPNLVYMVTGNPASDEIKR |
| | | | EQDLEVILHNGACSPGAR |
| | | | FNHLGHIFTFTPQNNEFQLQLSPK |
| | | | FSEEACAVLTSPTFEACHR |
| | | | GEYFWEK |
| | | | GLQPTLTNPGECR |
| | | | GLQPTLTNPGECRPNFTCACR |
| | | | GLWEQCQLLK |
| | | | GLYLETEAGYYK |
| | | | GQVYLQCGTPCNLTCR |
| | | | HCDGNVSSCGDHPSEGCFCPPDK |
| | | | HGAGVAMDGQDVQLPLLK |
| | | | HIVTFDGQNFK |
| | | | HLSISVVLK |
| | | | HSALSVELHSDMEVTVNGR |
| | | | IDGSGNFQVLLSDR |
| | | | IEDLPTMVTLGNSFLHK |
| | | | IGWPNAPILIQDFETLPR |
| | | | ILAGPAGDSNVVK |
| | | | ILDELLQTCVDPEDCPVCEVAGR |
| | | | ILTSDVFQDCNK |
| | | | IPGTCCDTCEEPECNDITAR |
| | | | ITLLLMASQEPQR |
| | | | KVIVIPVGIGPHANLK |
| | | | KWNCTDHVCDATCSTIGMAHYLTFD |
| | | | GLK |
| | | | LLDLVFLLDGSSR |
| | | | LPGDIQVVPIGVGPNANVQELER |
| | | | LSEAEFEVLK |
| | | | LSGEAYGFVAR |
| | | | LSYGEDLQMDWDGR |
| | | | LTGSCSYVLFQNK |
| | | | LTQVSVLQYGSITTIDVPWNVVPEK |
| | | | LVCPADNLR |
| | | | LVSVPYVGGNMEVNVYGAIMHEVR |
| | | | MEACMLNGTVIGPGK |
| | | | NSMVLDVAFVLEGSDK |
| | | | NSQWICSNEECPGECLVTGQSHFK |
| | | | NVSCPQLEVPVCPSGFQLSCK |
| | | | PGQTCQPILEEQCLVPDSSHCQVLLLP |
| | | | LFAECHK |
| | | | QNADQCCPEYECVCDPVSCDLPPVPH |
| | | | CER |
| | | | RDETLQDGCDTHFCK |
| | | | RLPGDIQVVPIGVGPNANVQELER |
| | | | RNSMVLDVAFVLEGSDK |
| | | | RPGDVWTLPDQCHTVTCQPDGQTLLK |
| | | | RPMKDETHFEVVESGR |
| | | | SEVEVDIHYCQGK |
| | | | SFSIIGDFQNGK |
| | | | SFSIIGDFQNGKR |
| | | | SGFTYVLHEGECCGR |
| | | | SLSYPDEECNEACLEGCFCPPGLYM |
| | | | DER |
| | | | STIYPVGQFWEEGCDVCTCTDMEDAV |
| | | | MGLR |
| | | | SVGSQWASPENPCLINECVR |
| | | | TATLCPQSCEER |
| | | | TCAQEGMVLYGWTDHSACSPVCPAG |
| | | | MEYR |
| | | | TCGLCGNYNGNQGDDFLTPSGLAEPR |
| | | | TCQNYDLECMSMGCVSGCLCPPG |
| | | | MVR |
| | | | TCQSLHINEMCQER |
| | | | TEPMQVALHCTNGSVVYHEVLNAM |
| | | | ECK |
| | | | TLCECAGGLECACPALLEYAR |
| | | | TLVQEWTVQR |
| | | | TLVQEWTVQRPGQTCQPILEEQCLVPD |
| | | | SSHCQVLLLPLFA |
| | | | ECHK |
| | | | TNGVCVDWR |
| | | | TNTGLALR |
| | | | TPDFCAMSCPPSLVYNHCEHGCPR |
| | | | TTCNPCPLGYK |
| | | | TVMIDVCTTCR |
| | | | TYGLCGICDENGANDFMLR |
| | | | VAVVEYHDGSHAYIGLK |
| | | | VCGLCGNFDGIQNNDLTSSNLQVEEDP |
| | | | VDFGNSWK |
| | | | VEDFGNAWK |
| | | | VIVIPVGIGPHANLK |
| | | | VKEEVFIQQR |
| | | | VLAPATFYAICQQDSCHQEQVCEVIASY |
| | | | AHLCR |
| | | | VMLEGSCVPEEACTQCIGEDGVQHQFL |
| | | | EAWVPDHQPCQICTCLSGR |
| | | | VPLDSSPATCHNNIMK |
| | | | VTGCPPFDEHK |
| | | | VTILVEGGEIELFDGEVNVK |
| | | | VTVFPIGIGDR |
| | | | WNCTDHVCDATCSTIGMAHYLTFDGLK |
| | | | WTCPCVCTGSSTR |
| | | | YAGSQVASTSEVLK |
| | | | YFTFSGICQYLLAR |
| | | | YIILLLGK |
| | | | YLFPGECQYVLVQDYCGSNPGTFR |
| | | | YLSDHSFLVSQGDR |
| | | | YLSDHSFLVSQGDREQAPNLVYMVTG |
| | | | NPASDEIK |
| | | | YNSCAPACQVTCQHPEPLACPVQCVE |
| | | | GCHAHCPPGK |
| | | | YTLFQIFSK |
| Q14508 | WFDC2 | WAP four-disulfide core | CCSAGCATFCSLPNDK |
| | | domain protein 2 | DQCQVDSQCPGQMK |
| | | | EGSCPQVNINFPQLGLCR |
| | | | TGVCPELQADQNCTQECVSDSECADN |
| | | | LK |

1. A method of in vitro diagnosing a systemic inflammation or prognosing a risk of mortality of a subject with a systemic inflammation, wherein the method comprises
a) determining the level of soluble V-set and immunoglobulin domain-containing protein 4 (sVSIG4) in a biological sample, and
b) drawing a conclusion as to the diagnosis of a systemic inflammation or the prognosis of a risk of mortality of a subject with a systemic inflammation from the presence and/or level of sVSIG4.

2. The method according to claim 1, wherein the systemic inflammation is caused by an infectious agent.

3. The method according to claim 2, wherein the systemic inflammation caused by an infectious agent is a sepsis, a systemic infection, or a bloodstream infection.

4. The method according to claim 2, wherein the infectious agent is a bacterium, a fungus or a virus.

5. The method according to claim 1, wherein the systemic inflammation is not caused by an infectious agent.

6. The method according to claim 5, wherein the systemic inflammation not caused by an infectious agent is systemic inflammatory reaction syndrome (SIRS).

7. The method according to claim 1, wherein SVSIG4 comprises the extracellular domain or a fragment of the extracellular domain of VSIG4.

8. The method according to claim 7, wherein the extracellular domain comprises Ig-like domain 1 (SEQ ID NO: 4), or Ig-like domain 1 (SEQ ID NO: 4) and Ig-like domain-2 (SEQ ID NO: 5), or the extracellular domain as defined in SEQ ID NO: 6.

9. The method according to claim 1, wherein the method further comprises:
determining the level of one or more additional biomarkers in the biological sample; and
in step b) drawing a conclusion as to the diagnosis of a systemic inflammation or the prognosis of a risk of mortality of a subject with a systemic inflammation from the presence and/or level of sVSIG4 in combination with the presence and/or level of the one or more additional biomarkers.

10. The method according to claim 9, wherein the one or more additional biomarkers in the biological sample are selected from one or more of the following:
(i) Inter-alpha-trypsin inhibitor heavy chain H2 (ITIH2), Inter-alpha-trypsin inhibitor heavy chain H1 (ITIH1), Phosphatidylinositol-glycan-specific phospholipase D (PHLD), N-acetylmuramoyl-L-alanine amidase (PGRP2), Kallistatin (KAIN), Alpha-2-HS-glycoprotein (FETUA), Inter-alpha-trypsin inhibitor heavy chain H3 (ITIH3), Afamin (AFAM), Macrophage mannose receptor 1 (MRC1), Cholinesterase (CHLE), Insulin-like growth factor-binding protein complex acid labile subunit (ALS), Serotransferrin (TRFE), Phosphatidylcholine-sterol acyltransferase (LCAT), Beta-Ala-His dipeptidase (CNDP1), Plasma kallikrein (KLKB1), Alpha-1-antichymotrypsin (AACT), Monocyte differentiation antigen CD14 (CD14), Neutrophil gelatinase-associated lipocalin (NGAL), Hepatocyte growth factor activator (HGFA), Scavenger receptor cysteine-rich type 1 protein M130 (C163A), Fibronectin (FINC), Histidine-rich glycoprotein (HRG), and Alpha-1-antitrypsin (A1AT);
(ii) Phosphatidylinositol-glycan-specific phospholipase D (PHLD), Kallistatin (KAIN), Alpha-2-HS-glycoprotein (FETUA), Afamin (AFAM), Macrophage mannose receptor 1 (MRC1), Cholinesterase (CHLE), Insulin-like growth factor-binding protein complex acid labile subunit (ALS), Beta-Ala-His dipeptidase (CNDP1), Neutrophil gelatinase-associated lipocalin (NGAL), Scavenger receptor cysteine-rich type 1 protein M130 (C163A), Plasma serine protease inhibitor (IPSP), Leucine-rich alpha-2-glycoprotein (A2GL), Lithostathine-1-alpha (REGIA), Lipopolysaccharide-binding protein (LBP), Lymphatic vessel endothelial hyaluronic acid receptor 1 (LYVE1), Insulin-like growth factor-binding protein 3 (IBP3), Complement receptor type 2 (CR2), Fibronectin (FINC), Asialoglycoprotein receptor 2 (ASGR2), Alkaline phosphatase, tissue-nonspecific isozyme (PPBT), Serum amyloid A-2 protein (SAA2), and Dipeptidylpeptidase 4 (DPP4);
(iii) Inter-alpha-trypsin inhibitor heavy chain H2 (ITIH2), N-acetylmuramoyl-L-alanine amidase (PGRP2), and Monocyte differentiation antigen CD14 (CD14);
(iv) Inter-alpha-trypsin inhibitor heavy chain H2 (ITIH2);
(v) Phosphatidylinositol-glycan-specific phospholipase D (PHLD), Leucine-rich alpha-2-glycoprotein (A2GL), and Insulin-like growth factor-binding protein 3 (IBP3);
(vi) Phosphatidylinositol-glycan-specific phospholipase D (PHLD);
(vii) C-reactive protein (CRP);
(viii) Procalcitonin (PCT);
(ix) Lithostathine-1-alpha (REGIA);
(x) Myeloblastin (PRTN3);
(xi) CRP and PCT,
wherein in step b) a conclusion is drawn as to the diagnosis of a systemic inflammation.

11. The method according to claim 9, wherein the one or more additional biomarkers in the biological sample are selected from one or more of the following:
(i) Kininogen-1 (KNG1) and Tenascin (TENA);
(ii) Versican core protein (CSPG2), Cadherin-related family member 2 (CDHR2), EMILIN-2 (EMIL2), Osteopontin (OSTP), Tyrosine-protein phosphatase non-receptor type substrate 1 (SHPS1), Lithostathine-1-beta (REG1B), Carcinoembryonic antigen-related cell adhesion molecule 6 (CEAM6), Paired immunoglobulin-like type 2 receptor alpha (PILRA), HLA class II histocompatibility antigen gamma chain (HG2A), Scavenger receptor cysteine-rich type 1 protein M130 (C163A), Fibroleukin (FGL2), Follistatin-related protein 3 (FSTL3), Fibromodulin (FMOD), Beta-galactoside alpha-2,6-sialyltransferase 1 (SIAT1), Myeloblastin (PRTN3), Leukocyte immunoglobulin-like receptor subfamily B member 5 (LIRB5), N-acetylmuramoyl-L-alanine amidase (PGRP2), Interleukin-1 receptor-like 1 (ILRL1), Neutrophil gelatinase-associated lipocalin (NGAL), Latent-transforming growth factor beta-binding protein 2 (LTBP2), Interleukin-1 receptor antagonist protein (ILIRA), Chromogranin-A (CMGA), Phosphoinositide-3-kinase-interacting protein 1 (P3IP1), Ribonuclease pancreatic (RNAS1), Ganglioside GM2 activator (SAP3), Neutrophil elastase (ELNE), Adseverin (ADSV), Disintegrin and metalloproteinase domain-containing protein 9 (ADAM9), Lithostathine-1-alpha (REGIA), Nucleobindin-1 (NUCB1), and WAP four-disulfide core domain protein 2 (WFDC2);
(iii) Scavenger receptor cysteine-rich type 1 protein M130 (C163A), Kallistatin (KAIN), Macrophage mannose receptor 1 (MRC1), Lymphatic vessel endothelial hyaluronic acid receptor 1 (LYVE1), Cholinesterase (CHLE), Ribonuclease pancreatic (RNAS1), Phospahtidylinositol-glycan-specific phospholipase D (PHLD), Afamin (AFAM), Insulin-like growth factor-binding protein complex acid labile subunit (ALS), Neutrophil gelatinase-associated lipocalin (NGAL), Phosphoinositide-3-kinase-interacting protein 1 (P3IP1), Alpha-2-HS-glycoprotein (FETUA), Ganglioside GM2 activator (SAP3), Beta-Ala-His-dipeptidase (CNDP1), Paired immunoglobulin-like type 2 receptor alpha (PILRA), CD177 antigen (CD177), V-type proton ATPase subunit S1 (VAS1), Plasma serine protease inhibitor (IPSP), Follistatin-related protein 3 (FSTL3), Pulmonary surfactant-associated protein B (PSPB), Tumor necrosis factor receptor superfamily member 1B (TNR1B), WAP four-disulfide core domain protein 2 (WFDC2), Alkaline phosphatase, tissue-nonspecific isozyme (PPBT), and Metalloproteinase inhibitor 1 (TIMP1);
(iv) C-reactive protein (CRP);
(v) Procalcitonin (PCT);
(vi) Lithostathine-1-alpha;
(vii) CRP and PCT,
wherein in step b) a conclusion is drawn as to the prognosis of a risk of mortality of a subject with a systemic inflammation.

12. A method of monitoring a systemic inflammation of a subject, wherein the method comprises:
i) performing the method of in vitro diagnosing a systemic inflammation or prognosing a risk of mortality of a subject with a systemic inflammation according to claim 1; and
ii) repeating step i) at least one time.

13. The method according to claim 12, wherein the method comprises repeating step ii) until diagnosing the absence of the systemic inflammation, or for monitoring the therapeutic success or therapeutic failure.

14. An antibiotic agent for use in a method of treating an infection in a subject or treating a subject with a suspected infection, wherein the infection is part of a bloodstream infection, systemic infection or sepsis and wherein the bloodstream infection, systemic infection or sepsis is diagnosed or monitored by the level of sVSIG4 in a biological sample.

15. A kit comprising a binding molecule to sVSIG4 and a binding molecule to at least one further biomarker for the quantitative detection of sVSIG4 and the at least one further biomarker.

16. The method according to claim 3, wherein the infectious agent is a bacterium, a fungus or a virus.

17. The method according to claim 3, wherein the systemic inflammation caused by an infectious agent is a sepsis.

18. The method according to claim 17, wherein the infectious agent is a bacterium, a fungus or a virus.

The application's sequence listing, which the Patent Office published only in electronic form, follows.

SEQUENCE LISTING (4223 sequences)

SEQ ID NO: 1 - protein, 399 aa, Homo sapiens
MGILLGLLLLGHLTVDTYGRPILEVPESVTGPWKGDVNLPCTYDPLQGYTQVLVKWLVQRGSDPVTIFLRDSSGDHIQQAKYQGRLHVSHKVPGDVSLQLSTLEMDDRSHYTCEVTWQTPDGNQVVRDKITELRVQKLSVSKPTVTTGSGYGFTVPQGMRISLQCQARGSPPISYIWYKQQTNNQEPIKVATLSTLLFKPAVIADSGSYFCTAKGQVGSEQHSDIVKFVVKDSSKLLKTKTEAPTTMTYPLKATSTVKQSWDWTTDMDGYLGETSAGPGKSLPVFAIILIISLCCMVVFTMAYIMLCRKTSQQEHVYEAARAHAREANDSGETMRVAIFASGCSSDEPTSQNLGNNYSDEPCIGQEYQIIAQINGNYARLLDTVPLDYEFLATEGKSVC

SEQ ID NO: 2 - protein, 321 aa, Homo sapiens
MGILLGLLLLGHLTVDTYGRPILEVPESVTGPWKGDVNLPCTYDPLQGYTQVLVKWLVQRGSDPVTIFLRDSSGDHIQQAKYQGRLHVSHKVPGDVSLQLSTLEMDDRSHYTCEVTWQTPDGNQVVRDKITELRVQKLSVSKPTVTTGSGYGFTVPQGMRISLQCQARGSPPISYIWYKQQTNNQEPIKVATLSTLLFKPAVIADSGSYFCTAKGQVGSEQHSDIVKFVVKDSSKLLKTKTEAPTTMTYPLKATSTVKQSWDWTTDMDGYLGETSAGPGKSLPVFAIILIISLCCMVVFTMAYIMLCRKTSQQEHVYEAAR

SEQ ID NO: 3 - protein, 305 aa, Homo sapiens
MGILLGLLLLGHLTVDTYGRPILEVPESVTGPWKGDVNLPCTYDPLQGYTQVLVKWLVQRGSDPVTIFLRDSSGDHIQQAKYQGRLHVSHKVPGDVSLQLSTLEMDDRSHYTCEVTWQTPDGNQVVRDKITELRVQKHSSKLLKTKTEAPTTMTYPLKATSTVKQSWDWTTDMDGYLGETSAGPGKSLPVFAIILIISLCCMVVFTMAYIMLCRKTSQQEHVYEAARAHAREANDSGETMRVAIFASGCSSDEPTSQNLGNNYSDEPCIGQEYQIIAQINGNYARLLDTVPLDYEFLATEGKSVC

SEQ ID NO: 4 - protein, 111 aa, Homo sapiens
PILEVPESVTGPWKGDVNLPCTYDPLQGYTQVLVKWLVQRGSDPVTIFLRDSSGDHIQQAKYQGRLHVSHKVPGDVSLQLSTLEMDDRSHYTCEVTWQTPDGNQVVRDKIT

SEQ ID NO: 5 - protein, 84 aa, Homo sapiens
PTVTTGSGYGFTVPQGMRISLQCQARGSPPISYIWYKQQTNNQEPIKVATLSTLLFKPAVIADSGSYFCTAKGQVGSEQHSDIV

SEQ ID NO: 6 - protein, 264 aa, Homo sapiens
RPILEVPESVTGPWKGDVNLPCTYDPLQGYTQVLVKWLVQRGSDPVTIFLRDSSGDHIQQAKYQGRLHVSHKVPGDVSLQLSTLEMDDRSHYTCEVTWQTPDGNQVVRDKITELRVQKLSVSKPTVTTGSGYGFTVPQGMRISLQCQARGSPPISYIWYKQQTNNQEPIKVATLSTLLFKPAVIADSGSYFCTAKGQVGSEQHSDIVKFVVKDSSKLLKTKTEAPTTMTYPLKATSTVKQSWDWTTDMDGYLGETSAGPGKSLP

SEQ ID NO: 7 - protein, 21 aa, Homo sapiens
VFAIILIISLCCMVVFTMAYI

SEQ ID NO: 8 - protein, 95 aa, Homo sapiens
MLCRKTSQQEHVYEAARAHAREANDSGETMRVAIFASGCSSDEPTSQNLGNNYSDEPCIGQEYQIIAQINGNYARLLDTVPLDYEFLATEGKSVC

SEQ ID NO: 9 - protein, 21 aa, Homo sapiens
GDVNLPCTYDPLQGYTQVLVK

SEQ ID NO: 10 - protein, 10 aa, Homo sapiens
GSDPVTIFLR

SEQ ID NO: 11 - protein, 17 aa, Homo sapiens
VPGDVSLQLSTLEMDDR

SEQ ID NO: 12 - protein, 19 aa, Homo sapiens
SHYTCEVTWQTPDGNQVVR

SEQ ID NO: 13 - protein, 23 aa, Homo sapiens
LSVSKPTVTTGSGYGFTVPQGMR

SEQ ID NO: 14 - protein, 18 aa, Homo sapiens
PTVTTGSGYGFTVPQGMR

SEQ ID NO: 15 - protein, 8 aa, Homo sapiens
ISLQCQAR

SEQ ID NO: 16 - protein, 11 aa, Homo sapiens
GSPPISYIWYK

SEQ ID NO: 17 - protein, 10 aa, Homo sapiens
VATLSTLLFK

SEQ ID NO: 18 - protein, 15 aa, Homo sapiens
PAVIADSGSYFCTAK

SEQ ID NO: 19 - protein, 27 aa, Homo sapiens
GLLHLENASYGIEPLQNSSHFEHIIYR

SEQ ID NO: 20 - protein, 20 aa, Homo sapiens
GYVEGVHNSSIALSDCFGLR

SEQ ID NO: 21 - protein, 19 aa, Homo sapiens
ACVGADLQAEMCNTQACEK

SEQ ID NO: 22 - protein, 21 aa, Homo sapiens
AGAQQPAVALETCNPQPCPAR

SEQ ID NO: 23 - protein, 36 aa, Homo sapiens
AHGEDDGEEILLDTQCQGLPRPEPQEACSLEPCPPR

SEQ ID NO: 24 - protein, 14 aa, Homo sapiens
CQVCGGDNSTCSPR

SEQ ID NO: 25 - protein, 22 aa, Homo sapiens
DTCLGPQAQAPVPADFCQHLPK

SEQ ID NO: 26 - protein, 23 aa, Homo sapiens
EHLDMCQALSCHTDPLDQSSCSR

SEQ ID NO: 27 - protein, 21 aa, Homo sapiens
EYVTFLTVTPNLTSVYIANHR

SEQ ID NO: 28 - protein, 10 aa, Homo sapiens
FDLELPDGNR

SEQ ID NO: 29 - protein, 13 aa, Homo sapiens
GPGQADCAVAIGR

SEQ ID NO: 30 - protein, 25 aa, Homo sapiens
IAIHALATNMGAGTEGANASYILIR

SEQ ID NO: 31 - protein, 15 aa, Homo sapiens
IWGPLQEDADIQVYR

SEQ ID NO: 32 - protein, 17 aa, Homo sapiens
LLPGPQENSVQSSACGR

SEQ ID NO: 33 - protein, 15 aa, Homo sapiens
LLVPLLDGTECGVEK

SEQ ID NO: 34 - protein, 27 aa, Homo sapiens
LPAPEPCVGMSCPPGWGHLDATSAGEK

SEQ ID NO: 35 - protein, 17 aa, Homo sapiens
MSISPNTTYPSLLEDGR

SEQ ID NO: 36 - protein, 9 aa, Homo sapiens
PLGEVVTLR

SEQ ID NO: 37 - protein, 25 aa, Homo sapiens
PQPGSAGHPPDAQPGLYYSANEQCR

SEQ ID NO: 38 - protein, 9 aa, Homo sapiens
QAWVWAAVR

SEQ ID NO: 39 - protein, 14 aa, Homo sapiens
SLVELTPIAAVHGR

SEQ ID NO: 40 - protein, 29 aa, Homo sapiens
TTAFHGQQVLYWESESSQAEMEFSEGFLK

SEQ ID NO: 41 - protein, 19 aa, Homo sapiens
VLESSLNCSAGDMLLLWGR

SEQ ID NO: 42 - protein, 13 aa, Homo sapiens
VPVQEELCGLASK

SEQ ID NO: 43 - protein, 11 aa, Homo sapiens
WVNYSCLDQAR

SEQ ID NO: 44 - protein, 21 aa, Homo sapiens
YGEEYGNLTRPDITFTYFQPK

SEQ ID NO: 45 - protein, 12 aa, Homo sapiens
YGSQLAPETFYR

SEQ ID NO: 46 - protein, 14 aa, Homo sapiens
YVLTNLNIGAELLR

SEQ ID NO: 47 - protein, 19 aa, Homo sapiens
CGICQGDGSSCTHVTGNYR

SEQ ID NO: 48 - protein, 18 aa, Homo sapiens
DFTLNETVNSIFAQGAPR

SEQ ID NO: 49 - protein, 18 aa, Homo sapiens
GNAHLGYSLVTHIPAGAR

SEQ ID NO: 50 - protein, 25 aa, Homo sapiens
GVCVSGKCEPIGCDGVLFSTHTLDK

SEQ ID NO: 51 - protein, 36 aa, Homo sapiens
LFGHPGLDMELGPSQGQETNEVCEQAGGGACEGPPR

SEQ ID NO: 52 - protein, 26 aa, Homo sapiens
MLSPGFDSSVYSDLCEAAEAVRPEER

SEQ ID NO: 53 - protein, 13 aa, Homo sapiens
NCPAHWLAQDWER

SEQ ID NO: 54 - protein, 10 aa, Homo sapiens
NFNIAGTVVK

SEQ ID NO: 55 - protein, 19 aa, Homo sapiens
NPACGPQWEMSEWSECTAK

SEQ ID NO: 56 - protein, 32 aa, Homo sapiens
PMDVYETGIEYIVAQGPTNQGLNVMVWNQNGK

SEQ ID NO: 57 - protein, 40 aa, Homo sapiens
PQPIYYGFSESAESQGLDGAGLMGFVPHNGSLYGQASSER

SEQ ID NO: 58 - protein, 21 aa, Homo sapiens
SADVLALADEAGYYFFNGNYK

SEQ ID NO: 59 - protein, 58 aa, Homo sapiens
SPSITFEYTLLQPPHESRPQPIYYGFSESAESQGLDGAGLMGFVPHNGSLYGQASSER

SEQ ID NO: 60 - protein, 24 aa, Homo sapiens
VANSSSEAPFPNVSTSLLTSAGNR

SEQ ID NO: 61 - protein, 27 aa, Homo sapiens
YDGVEVDDSYCDALTRPEPVHEFCAGR

SEQ ID NO: 62 - protein, 14 aa, Homo sapiens
AESPEVCFNEESPK

SEQ ID NO: 63 - protein, 9 aa, Homo sapiens
AIPVTQYLK

SEQ ID NO: 64 - protein, 17 aa, Homo sapiens
CCKAESPEVCFNEESPK

SEQ ID NO: 65 - protein, 21 aa, Homo sapiens
CMADKTLPECSKLPNNVLQEK

SEQ ID NO: 66 - protein, 10 aa, Homo sapiens
DADPDTFFAK

SEQ ID NO: 67 - protein, 10 aa, Homo sapiens
DIENFNSTQK

SEQ ID NO: 68 - protein, 17 aa, Homo sapiens
DLLRNCCNTENPPGCYR

SEQ ID NO: 69 - protein, 26 aa, Homo sapiens
ELISLVEDVSSNYDGCCEGDVVQCIR

SEQ ID NO: 70 - protein, 13 aa, Homo sapiens
ESLLNHFLYEVAR

SEQ ID NO: 71 - protein, 28 aa, Homo sapiens
FIEDNIEYITIIAFAQYVQEATFEEMEK

SEQ ID NO: 72 - protein, 7 aa, Homo sapiens
FLVNLVK

SEQ ID NO: 73 - protein, 11 aa, Homo sapiens
FTDSENVCQER

SEQ ID NO: 74 - protein, 7 aa, Homo sapiens
FTFEYSR

SEQ ID NO: 75 - protein, 21 aa, Homo sapiens
HELTDEELQSLFTNFANVVDK

SEQ ID NO: 76 - protein, 7 aa, Homo sapiens
HFQNLGK

SEQ ID NO: 77 - protein, 11 aa, Homo sapiens
HPDLSIPELLR

SEQ ID NO: 78 - protein, 16 aa, Homo sapiens
IAPQLSTEELVSLGEK

SEQ ID NO: 79 - protein, 10 aa, Homo sapiens
ICAMEGLPQK

SEQ ID NO: 80 - protein, 10 aa, Homo sapiens
IVQIYKDLLR

SEQ ID NO: 81 - protein, 18 aa, Homo sapiens
KSDVGFLPPFPTLDPEEK

SEQ ID NO: 82 - protein, 7 aa, Homo sapiens
LCFFYNK

SEQ ID NO: 83 - protein, 23 aa, Homo sapiens
LKHELTDEELQSLFTNFANVVDK

SEQ ID NO: 84 - protein, 9 aa, Homo sapiens
LPNNVLQEK

SEQ ID NO: 85 - protein, 36 aa, Homo sapiens
MVTAFTTCCTLSEEFACVDNLADLVFGELCGVNENR

SEQ ID NO: 86 - protein, 21 aa, Homo sapiens
NPFVFAPTLLTVAVHFEEVAK

SEQ ID NO: 87 - protein, 12 aa, Homo sapiens
RHPDLSIPELLR

SEQ ID NO: 88 - protein, 22 aa, Homo sapiens
RNPFVFAPTLLTVAVHFEEVAK

SEQ ID NO: 89 - protein, 8 aa, Homo sapiens
SCCEEQNK

SEQ ID NO: 90 - protein, 17 aa, Homo sapiens
SDVGFLPPFPTLDPEEK

SEQ ID NO: 91 - protein, 11 aa, Homo sapiens
TINPAVDHCCK

SEQ ID NO: 92 - protein, 28 aa, Homo sapiens
TYVPPPFSQDLFTFHADMCQSQNEELQR

SEQ ID NO: 93 - protein, 15 aa, Homo sapiens
VMNHICSKQDSISSK

SEQ ID NO: 94 - protein, 13 aa, Homo sapiens
VVHFIYIAILSQK

SEQ ID NO: 95 - protein, 12 aa, Homo sapiens
YAEDKFNETTEK

SEQ ID NO: 96 - protein, 14 aa, Homo sapiens
AAMVGMLANFLGFR

SEQ ID NO: 97 - protein, 24 aa, Homo sapiens
ADSQAQLLLSTVVGVFTAPGLHLK

SEQ ID NO: 98 - protein, 12 aa, Homo sapiens
ALQDQLVLVAAK

SEQ ID NO: 99 - protein, 18 aa, Homo sapiens
ALQDQLVLVAAKLDTEDK

SEQ ID NO: 100 - protein, 20 aa, Homo sapiens
ALQDQLVLVAAKLDTEDKLR

SEQ ID NO: 101 - protein, 19 aa, Homo sapiens
ANAGKPKDPTFIPAPIQAK

SEQ ID NO: 102 - protein, 12 aa, Homo sapiens
DPTFIPAPIQAK

SEQ ID NO: 103 - protein, 21 aa, Homo sapiens
EPTESTQQLNKPEVLEVTLNR

SEQ ID NO: 104 - protein, 40 aa, Homo sapiens
EPTESTQQLNKPEVLEVTLNRPFLFAVYDQSATALHFLGR

SEQ ID NO: 105 - protein, 9 aa, Homo sapiens
FMQAVTGWK

SEQ ID NO: 106 - protein, 12 aa, Homo sapiens
IDRFMQAVTGWK

SEQ ID NO: 107 - protein, 41 aa, Homo sapiens
IYGMHSELWGVVHGATVLSPTAVFGTLASLYLGALDHTADR

SEQ ID NO: 108 - protein, 22 aa, Homo sapiens
LDAHKVLSALQAVQGLLVAQGR

SEQ ID NO: 109 - protein, 10 aa, Homo sapiens
LQAILGVPWK

SEQ ID NO: 110 - protein, 12 aa, Homo sapiens
LQAILGVPWKDK

SEQ ID NO: 111 - protein, 17 aa, Homo sapiens
LQAILGVPWKDKNCTSR

SEQ ID NO: 112 - protein, 19 aa, Homo sapiens
PFLFAVYDQSATALHFLGR

SEQ ID NO: 113 - protein, 14 aa, Homo sapiens
PKDPTFIPAPIQAK

SEQ ID NO: 114 - protein, 17 aa, Homo sapiens
QPFVQGLALYTPVVLPR

SEQ ID NO: 115 - protein, 13 aa, Homo sapiens
SLDFTELDVAAEK

SEQ ID NO: 116 - protein, 16 aa, Homo sapiens
SLDFTELDVAAEKIDR

SEQ ID NO: 117 - protein, 25 aa, Homo sapiens
SLDFTELDVAAEKIDRFMQAVTGWK

SEQ ID NO: 118 - protein, 25 aa, Homo sapiens
TGCSLMGASVDSTLAFNTYVHFQGK

SEQ ID NO: 119 - protein, 38 aa, Homo sapiens
TIHLTMPQLVLQGSYDLQDLLAQAELPAILHTELNLQK

SEQ ID NO: 120 - protein, 15 aa, Homo sapiens
VEGLTFQQNSLNWMK

SEQ ID NO: 121 - protein, 17 aa, Homo sapiens
VGEVLNSIFFELEADER

SEQ ID NO: 122 - protein, 38 aa, Homo sapiens
VGEVLNSIFFELEADEREPTESTQQLNKPEVLEVTLNR

SEQ ID NO: 123 - protein, 17 aa, Homo sapiens
VLSALQAVQGLLVAQGR

SEQ ID NO: 124 - protein, 21 aa, Homo sapiens
VYIHPFHLVIHNESTCEQLAK

SEQ ID NO: 125 - protein, 22 aa, Homo sapiens
AALAAFNAQNNGSNFQLEEISR

SEQ ID NO: 126 - protein, 24 aa, Homo sapiens
AQLVPLPPSTYVEFTVSGTDCVAK

SEQ ID NO: 127 - protein, 31 aa, Homo sapiens
AQLVPLPPSTYVEFTVSGTDCVAKEATEAAK

SEQ ID NO: 128 - protein, 7 aa, Homo sapiens
CNLLAEK

SEQ ID NO: 129 - protein, 13 aa, Homo sapiens
CNLLAEKQYGFCK

SEQ ID NO: 130 - protein, 20 aa, Homo sapiens
EATEAAKCNLLAEKQYGFCK

SEQ ID NO: 131 - protein, 14 aa, Homo sapiens
EHAVEGDCDFQLLK

SEQ ID NO: 132 - protein, 18 aa, Homo sapiens
EHAVEGDCDFQLLKLDGK

SEQ ID NO: 133 - protein, 7 aa, Homo sapiens
FSVVYAK

SEQ ID NO: 134 - protein, 20 aa, Homo sapiens
HTFMGVVSLGSPSGEVSHPR

SEQ ID NO: 135 - protein, 10 aa, Homo sapiens
HTLNQIDEVK

SEQ ID NO: 136 - protein, 42 aa, Homo sapiens
HTLNQIDEVKVWPQQPSGELFEIEIDTLETTCHVLDPTPVAR

SEQ ID NO: 137 - protein, 16 aa, Homo sapiens
KVCQDCPLLAPLNDTR

SEQ ID NO: 138 - protein, 22 aa, Homo sapiens
KVCQDCPLLAPLNDTRVVHAAK

SEQ ID NO: 139 - protein, 17 aa, Homo sapiens
QLKEHAVEGDCDFQLLK

SEQ ID NO: 140 - protein, 21 aa, Homo sapiens
QLKEHAVEGDCDFQLLKLDGK

SEQ ID NO: 141 - protein, 29 aa, Homo sapiens
QPNCDDPETEEAALVAIDYINQNLPWGYK

SEQ ID NO: 142 - protein, 21 aa, Homo sapiens
TVVQPSVGAAAGPVVPPCPGR

SEQ ID NO: 143 - protein, 15 aa, Homo sapiens
VCQDCPLLAPLNDTR

SEQ ID NO: 144 - protein, 21 aa, Homo sapiens
VCQDCPLLAPLNDTRVVHAAK

SEQ ID NO: 145 - protein, 28 aa, Homo sapiens
VVHAAKAALAAFNAQNNGSNFQLEEISR

SEQ ID NO: 146 - protein, 32 aa, Homo sapiens
VWPQQPSGELFEIEIDTLETTCHVLDPTPVAR

SEQ ID NO: 147 - protein, 34 aa, Homo sapiens
AIGQAGSLTSSEDTLTVVTADHSHVFTFGGYTPR

SEQ ID NO: 148 - protein, 14 aa, Homo sapiens
ANEGTVGVSAATER

SEQ ID NO: 149 - protein, 14 aa, Homo sapiens
CNTTQGNEVTSILR

SEQ ID NO: 150 - protein, 22 aa, Homo sapiens
ENVSMVDYAHNNYQAQSAVPLR

SEQ ID NO: 151 - protein, 11 aa, Homo sapiens
LDGLDLVDTWK

SEQ ID NO: 152 - protein, 20 aa, Homo sapiens
NNVTDPSLSEMVVVAIQILR

SEQ ID NO: 153 - protein, 29 aa, Homo sapiens
TELLTLDPHNVDYLLGLFEPGDMQYELNR

SEQ ID NO: 154 - protein, 28 aa, Homo sapiens
VVGGERENVSMVDYAHNNYQAQSAVPLR

SEQ ID NO: 155 - protein, 11 aa, Homo sapiens
DLLQTVEDQYK

SEQ ID NO: 156 - protein, 10 aa, Homo sapiens
DLVFSTWDHK

SEQ ID NO: 157 - protein, 8 aa, Homo sapiens
FAMLDDVK

SEQ ID NO: 158 - protein, 14 aa, Homo sapiens
HDGIPAECTTIYNR

SEQ ID NO: 159 - protein, 15 aa, Homo sapiens
IDGSQNFNETWENYK

SEQ ID NO: 160 - protein, 16 aa, Homo sapiens
IDQDNSSFDSLSPEPK

SEQ ID NO: 161 - protein, 7 aa, Homo sapiens
IELEDWK

SEQ ID NO: 162 - protein, 14 aa, Homo sapiens
ILANGLLQLGHGLK

SEQ ID NO: 163 - protein, 11 aa, Homo sapiens
LDGEFWLGLEK

SEQ ID NO: 164 - protein, 23 aa, Homo sapiens
LNIFDQSFYDLSLQTSEIKEEEK

SEQ ID NO: 165 - protein, 12 aa, Homo sapiens
MLIHPTDSESFE

SEQ ID NO: 166 - protein, 25 aa, Homo sapiens
PSNSQVFHVYCDVISGSPWTLIQHR

SEQ ID NO: 167 - protein, 26 aa, Homo sapiens
YLEEQLTNLIQNQPETPEHPEVTSLK

SEQ ID NO: 168 - protein, 15 aa, Homo sapiens
ATPEAANASELAALR

SEQ ID NO: 169 - protein, 14 aa, Homo sapiens
FTGAVCWSGPASTR

SEQ ID NO: 170 - protein, 15 aa, Homo sapiens
GDHELLVLLEDWGGR

SEQ ID NO: 171 - protein, 25 aa, Homo sapiens
LCPGGAGGQQQVLPPPPLVPVVPVR

SEQ ID NO: 172 - protein, 26 aa, Homo sapiens
YLEEQLTNLIQNQPETPEHPEVTSLK

SEQ ID NO: 173 - protein, 11 aa, Homo sapiens
YQDGVYWAEFR

SEQ ID NO: 174 - protein, 15 aa, Homo sapiens
ATPEAANASELAALR

SEQ ID NO: 175 - protein, 14 aa, Homo sapiens
FTGAVCWSGPASTR

SEQ ID NO: 176 - protein, 15 aa, Homo sapiens
GDHELLVLLEDWGGR

SEQ ID NO: 177 - protein, 25 aa, Homo sapiens
LCPGGAGGQQQVLPPPPLVPVVPVR

SEQ ID NO: 178 - protein, 10 aa, Homo sapiens
VLNASAEAQR

SEQ ID NO: 179 - protein, 11 aa, Homo sapiens
YQDGVYWAEFR

SEQ ID NO: 180 - protein, 9 aa, Homo sapiens
DFNETQLAR

SEQ ID NO: 181 - protein, 22 aa, Homo sapiens
DHVFPVNDGFQALQGIIHSILK

SEQ ID NO: 182 - protein, 27 aa, Homo sapiens
INDSVTLNEKPFSVEDTYLLCPAPILK

SEQ ID NO: 183 - protein, 9 aa, Homo sapiens
LDALWVLLR

SEQ ID NO: 184 - protein, 8 aa, Homo sapiens
NLNNNMRR

SEQ ID NO: 185 - protein, 21 aa, Homo sapiens
SGSVLHHWNEIYYFVEQLAHK

SEQ ID NO: 186 - protein, 15 aa, Homo sapiens
DAFCVFEQNQGLPLR

SEQ ID NO: 187 - protein, 10 aa, Homo sapiens
EALAIVFFGR

SEQ ID NO: 188 - protein, 16 aa, Homo sapiens
ELPQASGLLHHCCFYK

SEQ ID NO: 189 - protein, 37 aa, Homo sapiens
GDQDAGACEVNPLACLPQAAACAPDLPAFSHGGFSHN

SEQ ID NO: 190 - protein, 23 aa, Homo sapiens
GVDCPYLATYVDWHFLLESQAPK

SEQ ID NO: 191 - protein, 19 aa, Homo sapiens
IQMLSFAGEPLPQNSSMAR

SEQ ID NO: 192 - protein, 35 aa, Homo sapiens
KEEEPSSSSVFNQNDPWAPTVDFSDFINNETIAGK

SEQ ID NO: 193 - protein, 12 aa, Homo sapiens
LGPGLVDAAQAR

SEQ ID NO: 194 - protein, 18 aa, Homo sapiens
LLEMEEQAAFLVGSATPR

SEQ ID NO: 195 - protein, 25 aa, Homo sapiens
LVYEISLQEALAIYGGNSPAAMTTR

SEQ ID NO: 196 - protein, 21 aa, Homo sapiens
QPQPNVSELVVGPLPHPSYMR

SEQ ID NO: 197 - protein, 18 aa, Homo sapiens
RPVLFQEYLDIDQMIFNR

SEQ ID NO: 198 - protein, 34 aa, Homo sapiens
VDLDVAGLENWVWAEDMVFVPMAVPWSPEHQLQR

SEQ ID NO: 199 - protein, 11 aa, Homo sapiens
YLYLASNHSNK

SEQ ID NO: 200 - protein, 22 aa, Homo sapiens
AALTELSLGSAYQAMILGVDSK

SEQ ID NO: 201 - protein, 13 aa, Homo sapiens
AASGTTGTYQEWK

SEQ ID NO: 202 - protein, 23 aa, Homo sapiens
ADSVVDLLSYNVQGSGETTYDHK

SEQ ID NO: 203 - protein, 30 aa, Homo sapiens
ADYVETVLDSTCSSTVQFLEYELNVLGTHK

SEQ ID NO: 204 - protein, 13 aa, Homo sapiens
AEPLAFTFSHDYK

SEQ ID NO: 205 - protein, 14 aa, Homo sapiens
AHLDIAGSLEGHLR

SEQ ID NO: 206 - protein, 7 aa, Homo sapiens
ALVDTLK

SEQ ID NO: 207 - protein, 16 aa, Homo sapiens
ALVDTLKFVTQAEGAK

SEQ ID NO: 208 - protein, 13 aa, Homo sapiens
ALVEQGFTVPEIK

SEQ ID NO: 209 - protein, 15 aa, Homo sapiens
ALYWVNGQVPDGVSK

SEQ ID NO: 210 - protein, 7 aa, Homo sapiens
AQIPILR

SEQ ID NO: 211 - protein, 21 aa, Homo sapiens
AQNLYQELLTQEGQASFQGLK

SEQ ID NO: 212 - protein, 30 aa, Homo sapiens
AQNLYQELLTQEGQASFQGLKDNVFDGLVR

SEQ ID NO: 213 - protein, 29 aa, Homo sapiens
ARYHMKADSVVDLLSYNVQGSGETTYDHK

SEQ ID NO: 214 - protein, 19 aa, Homo sapiens
ASGSLPYTQTLQDHLNSLK

SEQ ID NO: 215 - protein, 16 aa, Homo sapiens
ATFQTPDFIVPLTDLR

SEQ ID NO: 216 - protein, 11 aa, Homo sapiens
ATGVLYDYVNK

SEQ ID NO: 217 - protein, 22 aa, Homo sapiens
ATGVLYDYVNKYHWEHTGLTLR

SEQ ID NO: 218 - protein, 41 aa, Homo sapiens
ATLELSPWQMSALVQVHASQPSSFHDFPDLGQEVALNANTK

SEQ ID NO: 219 - protein, 15 aa, Homo sapiens
ATLYALSHAVNNYHK

SEQ ID NO: 220 - protein, 14 aa, Homo sapiens
ATVAVYLESLQDTK

SEQ ID NO: 221 - protein, 15 aa, Homo sapiens
AVSMPSFSILGSDVR

SEQ ID NO: 222 - protein, 22 aa, Homo sapiens
CSLLVLENELNAELGLSGASMK

SEQ ID NO: 223 - protein, 13 aa, Homo sapiens
CVQSTKPSLMIQK

SEQ ID NO: 224 - protein, 16 aa, Homo sapiens
DAVEKPQEFTIVAFVK

SEQ ID NO: 225 - protein, 18 aa, Homo sapiens
DDKHEQDMVNGIMLSVEK

SEQ ID NO: 226 - protein, 10 aa, Homo sapiens
DEPTYILNIK

SEQ ID NO: 227 - protein, 11 aa, Homo sapiens
DEPTYILNIKR

SEQ ID NO: 228 - protein, 27 aa, Homo sapiens
DFHSEYIVSASNFTSQLSSQVEQFLHR

SEQ ID NO: 229 - protein, 11 aa, Homo sapiens
DFSAEYEEDGK

SEQ ID NO: 230 - protein, 21 aa, Homo sapiens
DFSAEYEEDGKYEGLQEWEGK

SEQ ID NO: 231 - protein, 7 aa, Homo sapiens
DFSLWEK

SEQ ID NO: 232 - protein, 23 aa, Homo sapiens
DKAQNLYQELLTQEGQASFQGLK

SEQ ID NO: 233 - protein, 32 aa, Homo sapiens
DKAQNLYQELLTQEGQASFQGLKDNVFDGLVR

SEQ ID NO: 234 - protein, 20 aa, Homo sapiens
DKDQEVLLQTFLDDASPGDK

SEQ ID NO: 235 - protein, 21 aa, Homo sapiens
DKDQEVLLQTFLDDASPGDKR

SEQ ID NO: 236 - protein, 11 aa, Homo sapiens
DLKVEDIPLAR

SEQ ID NO: 237 - protein, 9 aa, Homo sapiens
DNVFDGLVR

SEQ ID NO: 238 - protein, 18 aa, Homo sapiens
DQEVLLQTFLDDASPGDK

SEQ ID NO: 239 - protein, 19 aa, Homo sapiens
DQEVLLQTFLDDASPGDKR

SEQ ID NO: 240 - protein, 9 aa, Homo sapiens
DSYDLHDLK

SEQ ID NO: 241 - protein, 7 aa, Homo sapiens
EAQEVFK

SEQ ID NO: 242 - protein, 9 aa, Homo sapiens
EELCTMFIR

SEQ ID NO: 243 - protein, 14 aa, Homo sapiens
EEYFDPSIVGWTVK

SEQ ID NO: 244 - protein, 21 aa, Homo sapiens
EFNLQNMGLPDFHIPENLFLK

SEQ ID NO: 245 - protein, 11 aa, Homo sapiens
EFQVPTFTIPK

SEQ ID NO: 246 - protein, 7 aa, Homo sapiens
EIFNMAR

SEQ ID NO: 247 - protein, 23 aa, Homo sapiens
ELCTISHIFIPAMGNITYDFSFK

SEQ ID NO: 248 - protein, 11 aa, Homo sapiens
ENFAGEATLQR

SEQ ID NO: 249 - protein, 9 aa, Homo sapiens
ENLCLNLHK

SEQ ID NO: 250 - protein, 11 aa, Homo sapiens
EQHLFLPFSYK

SEQ ID NO: 251 - protein, 11 aa, Homo sapiens
ESQLPTVMDFR

SEQ ID NO: 252 - protein, 12 aa, Homo sapiens
EVGTVLSQVYSK

SEQ ID NO: 253 - protein, 10 aa, Homo sapiens
EVYGFNPEGK

SEQ ID NO: 254 - protein, 17 aa, Homo sapiens
EYSGTIASEANTYLNSK

SEQ ID NO: 255 - protein, 19 aa, Homo sapiens
FDHTNSLNIAGLSLDFSSK

SEQ ID NO: 256 - protein, 17 aa, Homo sapiens
FEVDSPVYNATWSASLK

SEQ ID NO: 257 - protein, 19 aa, Homo sapiens
FEVDSPVYNATWSASLKNK

SEQ ID NO: 258 - protein, 7 aa, Homo sapiens
FFGEGTK

SEQ ID NO: 259 - protein, 25 aa, Homo sapiens
FFSLLSGSLNSHGLELNADILGTDK

SEQ ID NO: 260 - protein, 7 aa, Homo sapiens
FIIPGLK

SEQ ID NO: 261 - protein, 7 aa, Homo sapiens
FIIPSPK

SEQ ID NO: 262 - protein, 7 aa, Homo sapiens
FLDMLIK

SEQ ID NO: 263 - protein, 7 aa, Homo sapiens
FLDSNIK

SEQ ID NO: 264 - protein, 27 aa, Homo sapiens
FNEFIQNELQEASQELQQIHQYIMALR

SEQ ID NO: 265 - protein, 41 aa, Homo sapiens
FNEFIQNELQEASQELQQIHQYIMALREEYFDPSIVGWTVK

SEQ ID NO: 266 - protein, 15 aa, Homo sapiens
FNSSYLQGTNQITGR

SEQ ID NO: 267 - protein, 9 aa, Homo sapiens
FPEVDVLTK

SEQ ID NO: 268 - protein, 12 aa, Homo sapiens
FQFPGKPGIYTR

SEQ ID NO: 269 - protein, 9 aa, Homo sapiens
FRETLEDTR

SEQ ID NO: 270 - protein, 27 aa, Homo sapiens
FSDEGTHESQISFTIEGPLTSFGLSNK

SEQ ID NO: 271 - protein, 25 aa, Homo sapiens
FSTPEFTILNTFHIPSFTIDFVEMK

SEQ ID NO: 272 - protein, 18 aa, Homo sapiens
FSVPAGIVIPSFQALTAR

SEQ ID NO: 273 - protein, 25 aa, Homo sapiens
FTYLINYIQDEINTIFSDYIPYVFK

SEQ ID NO: 274 - protein, 15 aa, Homo sapiens
FVEGSHNSTVSLTTK

SEQ ID NO: 275 - protein, 26 aa, Homo sapiens
FVEGSHNSTVSLTTKNMEVSVATTTK

SEQ ID NO: 276 - protein, 9 aa, Homo sapiens
FVTQAEGAK

SEQ ID NO: 277 - protein, 23 aa, Homo sapiens
GAVDHKLSLESLTSYFSIESSTK

SEQ ID NO: 278 - protein, 27 aa, Homo sapiens
GAVDHKLSLESLTSYFSIESSTKGDVK

SEQ ID NO: 279 - protein, 22 aa, Homo sapiens
GESKLEVLNFDFQANAQLSNPK

SEQ ID NO: 280 - protein, 12 aa, Homo sapiens
GFEPTLEALFGK

SEQ ID NO: 281 - protein, 16 aa, Homo sapiens
GIISALLVPPETEEAK

SEQ ID NO: 282 - protein, 35 aa, Homo sapiens
GIISALLVPPETEEAKQVLFLDTVYGNCSTHFTVK

SEQ ID NO: 283 - protein, 26 aa, Homo sapiens
GISTSAASPAVGTVGMDMDEDDDFSK

SEQ ID NO: 284 - protein, 40 aa, Homo sapiens
GISTSAASPAVGTVGMDMDEDDDFSKWNFYYSPQSSPDKK

SEQ ID NO: 285 - protein, 24 aa, Homo sapiens
GLLIFDASSSWGPQMSASVHLDSK

SEQ ID NO: 286 - protein, 43 aa, Homo sapiens
GLSDEAVTSLLPQLIEVSSPITLQALVQCGQPQCSTHILQWLK

SEQ ID NO: 287 - protein, 9 aa, Homo sapiens
GMALFGEGK

SEQ ID NO: 288 - protein, 15 aa, Homo sapiens
GMALFGEGKAEFTGR

SEQ ID NO: 289 - protein, 23 aa, Homo sapiens
GMTRPLSTLISSSQSCQYTLDAK

SEQ ID NO: 290 - protein, 11 aa, Homo sapiens
GNVATEISTER

SEQ ID NO: 291 - protein, 9 aa, Homo sapiens
GTYGLSCQR

SEQ ID NO: 292 - protein, 7 aa, Homo sapiens
GVISIPR

SEQ ID NO: 293 - protein, 15 aa, Homo sapiens
HEQDMVNGIMLSVEK

SEQ ID NO: 294 - protein, 15 aa, Homo sapiens
HFVINLIGDFEVAEK

SEQ ID NO: 295 - protein, 9 aa, Homo sapiens
HINIDQFVR

SEQ ID NO: 296 - protein, 13 aa, Homo sapiens
HIQNIDIQHLAGK

SEQ ID NO: 297 - protein, 15 aa, Homo sapiens
HIYAISSAALSASYK

SEQ ID NO: 298 - protein, 14 aa, Homo sapiens
HLIDSLIDFLNFPR

SEQ ID NO: 299 - protein, 21 aa, Homo sapiens
HRHSITNPLAVLCEFISQSIK

SEQ ID NO: 300 - protein, 19 aa, Homo sapiens
HSITNPLAVLCEFISQSIK

SEQ ID NO: 301 - protein, 22 aa, Homo sapiens
IADFELPTIIVPEQTIEIPSIK

SEQ ID NO: 302 - protein, 13 aa, Homo sapiens
IAELSATAQEIIK

SEQ ID NO: 303 - protein, 13 aa, Homo sapiens
IAIANIIDEIIEK

SEQ ID NO: 304 - protein, 15 aa, Homo sapiens
IAIANIIDEIIEKLK

SEQ ID NO: 305 - protein, 10 aa, Homo sapiens
IDDIWNLEVK

SEQ ID NO: 306 - protein, 25 aa, Homo sapiens
IDFLNNYALFLSPSAQQASWQVSAR

SEQ ID NO: 307 - protein, 14 aa, Homo sapiens
IEFEWNTGTNVDTK

SEQ ID NO: 308 - protein, 15 aa, Homo sapiens
IEFEWNTGTNVDTKK

SEQ ID NO: 309 - protein, 15 aa, Homo sapiens
IEGNLIFDPNNYLPK

SEQ ID NO: 310 - protein, 10 aa, Homo sapiens
IEIPLPFGGK

SEQ ID NO: 311 - protein, 15 aa, Homo sapiens
IGQDGISTSATTNLK

SEQ ID NO: 312 - protein, 8 aa, Homo sapiens
IGVELTGR

SEQ ID NO: 313 - protein, 18 aa, Homo sapiens
IHSGSFQSQVELSNDQEK

SEQ ID NO: 314 - protein, 10 aa, Homo sapiens
IISDYHQQFR

SEQ ID NO: 315 - protein, 19 aa, Homo sapiens
ILGEELGFASLHDLQLLGK

SEQ ID NO: 316 - protein, 12 aa, Homo sapiens
INNQLTLDSNTK

SEQ ID NO: 317 - protein, 7 aa, Homo sapiens
INPLALK

SEQ ID NO: 318 - protein, 11 aa, Homo sapiens
INPLALKESVK

SEQ ID NO: 319 - protein, 9 aa, Homo sapiens
IPSVQINFK

SEQ ID NO: 320 - protein, 33 aa, Homo sapiens
IQSPLFTLDANADIGNGTTSANEAGIAASITAK

SEQ ID NO: 321 - protein, 14 aa, Homo sapiens
ITENDIQIALDDAK

SEQ ID NO: 322 - protein, 15 aa, Homo sapiens
ITEVALMGHLSCDTK

SEQ ID NO: 323 - protein, 21 aa, Homo sapiens
ITLIINWLQEALSSASLAHMK

SEQ ID NO: 324 - protein, 7 aa, Homo sapiens
ITLPDFR

SEQ ID NO: 325 - protein, 14 aa, Homo sapiens
IVQILPWEQNEQVK

SEQ ID NO: 326 - protein, 10 aa, Homo sapiens
IYSLWEHSTK

SEQ ID NO: 327 - protein, 27 aa, Homo sapiens
KGISTSAASPAVGTVGMDMDEDDDFSK

SEQ ID NO: 328 - protein, 11 aa, Homo sapiens
KIISDYHQQFR

SEQ ID NO: 329 - protein, 16 aa, Homo sapiens
KITEVALMGHLSCDTK

SEQ ID NO: 330 - protein, 11 aa, Homo sapiens
KLTISEQNIQR

SEQ ID NO: 331 - protein, 15 aa, Homo sapiens
KMTSNFPVDLSDYPK

SEQ ID NO: 332 - protein, 21 aa, Homo sapiens
KYTYNYEAESSSGVPGTADSR

SEQ ID NO: 333 - protein, 9 aa, Homo sapiens
LAAYLMLMR

SEQ ID NO: 334 - protein, 14 aa, Homo sapiens
LALWGEHTGQLYSK

SEQ ID NO: 335 - protein, 10 aa, Homo sapiens
LAPGELTIIL

SEQ ID NO: 336 - protein, 10 aa, Homo sapiens
LATALSLSNK

SEQ ID NO: 337 - protein, 25 aa, Homo sapiens
LATALSLSNKFVEGSHNSTVSLTTK

SEQ ID NO: 338 - protein, 10 aa, Homo sapiens
LDFSSQADLR

SEQ ID NO: 339 - protein, 14 aa, Homo sapiens
LDFSSQADLRNEIK

SEQ ID NO: 340 - protein, 9 aa, Homo sapiens
LDNIYSSDK

SEQ ID NO: 341 - protein, 12 aa, Homo sapiens
LDNIYSSDKFYK

SEQ ID NO: 342 - protein, 9 aa, Homo sapiens
LDVTTSIGR

SEQ ID NO: 343 - protein, 20 aa, Homo sapiens
LEIQSQVDSQHVGHSVLTAK

SEQ ID NO: 344 - protein, 24 aa, Homo sapiens
LELELRPTGEIEQYSVSATYELQR

SEQ ID NO: 345 - protein, 13 aa, Homo sapiens
LEPLKLHVAGNLK

SEQ ID NO: 346 - protein, 13 aa, Homo sapiens
LEVANMQAELVAK

SEQ ID NO: 347 - protein, 33 aa, Homo sapiens
LEVANMQAELVAKPSVSVEFVTNMGIIIPDFAR

SEQ ID NO: 348 - protein, 18 aa, Homo sapiens
LEVLNFDFQANAQLSNPK

SEQ ID NO: 349 - protein, 7 aa, Homo sapiens
LFLEETK

SEQ ID NO: 350 - protein, 21 aa, Homo sapiens
LIDLSIQNYHTFLIYITELLK

SEQ ID NO: 351 - protein, 22 aa, Homo sapiens
LIDLSIQNYHTFLIYITELLKK

SEQ ID NO: 352 - protein, 9 aa, Homo sapiens
LIDVISMYR

SEQ ID NO: 353 - protein, 11 aa, Homo sapiens
LIVAMSSWLQK

SEQ ID NO: 354 - protein, 20 aa, Homo sapiens
LKTQFNNNEYSQDLDAYNTK

SEQ ID NO: 355 - protein, 18 aa, Homo sapiens
LLLQMDSSATAYGSTVSK

SEQ ID NO: 356 - protein, 19 aa, Homo sapiens
LLLQMDSSATAYGSTVSKR

SEQ ID NO: 357 - protein, 15 aa, Homo sapiens
LLSGGNTLHLVSTTK

SEQ ID NO: 358 - protein, 26 aa, Homo sapiens
LLSGGNTLHLVSTTKTEVIPPLIENR

SEQ ID NO: 359 - protein, 26 aa, Homo sapiens
LNDLNSVLVMPTFHVPFTDLQVPSCK

SEQ ID NO: 360 - protein, 7 aa, Homo sapiens
LNELSFK

SEQ ID NO: 361 - protein, 13 aa, Homo sapiens
LNGEIQALELPQK

SEQ ID NO: 362 - protein, 18 aa, Homo sapiens
LNGEIQALELPQKAEALK

SEQ ID NO: 363 - protein, 23 aa, Homo sapiens
LNGESNLRFNSSYLQGTNQITGR

SEQ ID NO: 364 - protein, 15 aa, Homo sapiens
LNIPKLDFSSQADLR

SEQ ID NO: 365 - protein, 30 aa, Homo sapiens
LNTDIAGLASAIDMSTNYNSDSLHFSNVFR

SEQ ID NO: 366 - protein, 16 aa, Homo sapiens
LPQQANDYLNSFNWER

SEQ ID NO: 367 - protein, 12 aa, Homo sapiens
LPYTIITTPPLK

SEQ ID NO: 368 - protein, 19 aa, Homo sapiens
LPYTIITTPPLKDFSLWEK

SEQ ID NO: 369 - protein, 14 aa, Homo sapiens
LQDFSDQLSDYYEK

SEQ ID NO: 370 - protein, 21 aa, Homo sapiens
LQDFSDQLSDYYEKFIAESKR

SEQ ID NO: 371 - protein, 12 aa, Homo sapiens
LQSTTVMNPYMK

SEQ ID NO: 372 - protein, 17 aa, Homo sapiens
LSLESLTSYFSIESSTK

SEQ ID NO: 373 - protein, 21 aa, Homo sapiens
LSLESLTSYFSIESSTKGDVK

SEQ ID NO: 374 - protein, 7 aa, Homo sapiens
LSLPDFK

SEQ ID NO: 375 - protein, 30 aa, Homo sapiens
LSLPDFKELCTISHIFIPAMGNITYDFSFK

SEQ ID NO: 376 - protein, 13 aa, Homo sapiens
LSNDMMGSYAEMK

SEQ ID NO: 377 - protein, 32 aa, Homo sapiens
LSNDMMGSYAEMKFDHTNSLNIAGLSLDFSSK

SEQ ID NO: 378 - protein, 9 aa, Homo sapiens
LSNVLQQVK

SEQ ID NO: 379 - protein, 16 aa, Homo sapiens
LSQLQTYMIQFDQYIK

SEQ ID NO: 380 - protein, 25 aa, Homo sapiens
LSQLQTYMIQFDQYIKDSYDLHDLK

SEQ ID NO: 381 - protein, 10 aa, Homo sapiens
LTISEQNIQR

SEQ ID NO: 382 - protein, 8 aa, Homo sapiens
LTLDIQNK

SEQ ID NO: 383 - protein, 9 aa, Homo sapiens
LVELAHQYK

SEQ ID NO: 384 - protein, 10 aa, Homo sapiens
LVGFIDDAVK

SEQ ID NO: 385 - protein, 11 aa, Homo sapiens
LVGFIDDAVKK

SEQ ID NO: 386 - protein, 42 aa, Homo sapiens
LYQLQVPLLGVLDLSTNVYSNLYNWSASYSGGNTSTDHFSLR

SEQ ID NO: 387 - protein, 7 aa, Homo sapiens
MDMTFSK

SEQ ID NO: 388 - protein, 9 aa, Homo sapiens
MGLAFESTK

SEQ ID NO: 389 - protein, 14 aa, Homo sapiens
MTSNFPVDLSDYPK

SEQ ID NO: 390 - protein, 12 aa, Homo sapiens
MYQMDIQQELQR

SEQ ID NO: 391 - protein, 37 aa, Homo sapiens
NDFFLHYIFMENAFELPTGAGLQLQISSSGVIAPGAK

SEQ ID NO: 392 - protein, 22 aa, Homo sapiens
NFVASHIANILNSEELDIQDLK

SEQ ID NO: 393 - protein, 23 aa, Homo sapiens
NFVASHIANILNSEELDIQDLKK

SEQ ID NO: 394 - protein, 18 aa, Homo sapiens
NHLQLEGLFFTNGEHTSK

SEQ ID NO: 395 - protein, 6 aa, Homo sapiens
NIFNFK

SEQ ID NO: 396 - protein, 9 aa, Homo sapiens
NIILPVYDK

SEQ ID NO: 397 - protein, 15 aa, Homo sapiens
NIQEYLSILTDPDGK

SEQ ID NO: 398 - protein, 17 aa, Homo sapiens
NIQEYLSILTDPDGKGK

SEQ ID NO: 399 - protein, 32 aa, Homo sapiens
NKADYVETVLDSTCSSTVQFLEYELNVLGTHK

SEQ ID NO: 400 - protein, 41 aa, Homo sapiens
NKADYVETVLDSTCSSTVQFLEYELNVLGTHKIEDGTLASK

SEQ ID NO: 401 - protein, 7 aa, Homo sapiens
NLLVALK

SEQ ID NO: 402 - protein, 34 aa, Homo sapiens
NLLVALKDFHSEYIVSASNFTSQLSSQVEQFLHR

SEQ ID NO: 403 - protein, 18 aa, Homo sapiens
NLQDLLQFIFQLIEDNIK

SEQ ID NO: 404 - protein, 15 aa, Homo sapiens
NLQNNAEWVYQGAIR

SEQ ID NO: 405 - protein, 16 aa, Homo sapiens
NLTDFAEQYSIQDWAK

SEQ ID NO: 406 - protein, 11 aa, Homo sapiens
NMEVSVATTTK

SEQ ID NO: 407 - protein, 9 aa, Homo sapiens
NNALDFVTK

SEQ ID NO: 408 - protein, 15 aa, Homo sapiens
NNALDFVTKSYNETK

SEQ ID NO: 409 - protein, 12 aa, Homo sapiens
NPNGYSFSIPVK

SEQ ID NO: 410 - protein, 21 aa, Homo sapiens
NQDVHSINLPFFETLQEYFER

SEQ ID NO: 411 - protein, 14 aa, Homo sapiens
NRQTIIVVLENVQR

SEQ ID NO: 412 - protein, 11 aa, Homo sapiens
NSEEFAAAMSR

SEQ ID NO: 413 - protein, 23 aa, Homo sapiens
NSLFFSAQPFEITASTNNEGNLK

SEQ ID NO: 414 - protein, 14 aa, Homo sapiens
NSLKIEIPLPFGGK

SEQ ID NO: 415 - protein, 15 aa, Homo sapiens
NTASLKYENYELTLK

SEQ ID NO: 416 - protein, 21 aa, Homo sapiens
NTASLKYENYELTLKSDTNGK

SEQ ID NO: 417 - protein, 12 aa, Homo sapiens
NTLELSNGVIVK

SEQ ID NO: 418 - protein, 19 aa, Homo sapiens
PLSTLISSSQSCQYTLDAK

SEQ ID NO: 419 - protein, 7 aa, Homo sapiens
PSLMIQK

SEQ ID NO: 420 - protein, 20 aa, Homo sapiens
PSVSVEFVTNMGIIIPDFAR

SEQ ID NO: 421 - protein, 18 aa, Homo sapiens
PTGEIEQYSVSATYELQR

SEQ ID NO: 422 - protein, 10 aa, Homo sapiens
QGFFPDSVNK

SEQ ID NO: 423 - protein, 9 aa, Homo sapiens
QHIEAIDVR

SEQ ID NO: 424 - protein, 8 aa, Homo sapiens
QIDDIDVR

SEQ ID NO: 425 - protein, 8 aa, Homo sapiens
QSFDLSVK

SEQ ID NO: 426 - protein, 23 aa, Homo sapiens
QSMTLSSEVQIPDFDVDLGTILR

SEQ ID NO: 427 - protein, 7 aa, Homo sapiens
QSWSVCK

SEQ ID NO: 428 - protein, 9 aa, Homo sapiens
QTEATMTFK

SEQ ID NO: 429 - protein, 12 aa, Homo sapiens
QTIIVVLENVQR

SEQ ID NO: 430 - protein, 21 aa, Homo sapiens
QTVNLQLQPYSLVTTLNSDLK

SEQ ID NO: 431 - protein, 8 aa, Homo sapiens
QVFLYPEK

SEQ ID NO: 432 - protein, 18 aa, Homo sapiens
QVFLYPEKDEPTYILNIK

SEQ ID NO: 433 - protein, 19 aa, Homo sapiens
QVFLYPEKDEPTYILNIKR

SEQ ID NO: 434 - protein, 33 aa, Homo sapiens
QVFPGLNYCTSGAYSNASSTDSASYYPLTGDTR

SEQ ID NO: 435 - protein, 19 aa, Homo sapiens
QVLFLDTVYGNCSTHFTVK

SEQ ID NO: 436 - protein, 17 aa, Homo sapiens
RGIISALLVPPETEEAK

SEQ ID NO: 437 - protein, 14 aa, Homo sapiens
RHIQNIDIQHLAGK

SEQ ID NO: 438 - protein, 16 aa, Homo sapiens
RNLQNNAEWVYQGAIR

SEQ ID NO: 439 - protein, 11 aa, Homo sapiens
SEILAHWSPAK

SEQ ID NO: 440 - protein, 11 aa, Homo sapiens
SEYQADYESLR

SEQ ID NO: 441 - protein, 14 aa, Homo sapiens
SFDYHQFVDETNDK

SEQ ID NO: 442 - protein, 16 aa, Homo sapiens
SFDYHQFVDETNDKIR

SEQ ID NO: 443 - protein, 15 aa, Homo sapiens
SGSSTASWIQNVDTK

SEQ ID NO: 444 - protein, 19 aa, Homo sapiens
SGSSTASWIQNVDTKYQIR

SEQ ID NO: 445 - protein, 22 aa, Homo sapiens
SGVQMNTNFFHESGLEAHVALK

SEQ ID NO: 446 - protein, 9 aa, Homo sapiens
SISAALEHK

SEQ ID NO: 447 - protein, 25 aa, Homo sapiens
SKPTVSSSMEFKYDFNSSMLYSTAK

SEQ ID NO: 448 - protein, 7 aa, Homo sapiens
SLWDFLK

SEQ ID NO: 449 - protein, 11 aa, Homo sapiens
SNTVASLHTEK

SEQ ID NO: 450 - protein, 23 aa, Homo sapiens
SNTVASLHTEKNTLELSNGVIVK

SEQ ID NO: 451 - protein, 10 aa, Homo sapiens
SPAFTDLHLR

SEQ ID NO: 452 - protein, 9 aa, Homo sapiens
SPSQADINK

SEQ ID NO: 453 - protein, 36 aa, Homo sapiens
SSVITLNTNAELFNQSDIVAHLLSSSSSVIDALQYK

SEQ ID NO: 454 - protein, 9 aa, Homo sapiens
SVGFHLPSR

SEQ ID NO: 455 - protein, 19 aa, Homo sapiens
SVMAPFTMTIDAHTNGNGK

SEQ ID NO: 456 - protein, 17 aa, Homo sapiens
SVSDGIAALDLNAVANK

SEQ ID NO: 457 - protein, 13 aa, Homo sapiens
SVSLPSLDPASAK

SEQ ID NO: 458 - protein, 17 aa, Homo sapiens
TEHGSEMLFFGNAIEGK

SEQ ID NO: 459 - protein, 11 aa, Homo sapiens
TEVIPPLIENR

SEQ ID NO: 460 - protein, 8 aa, Homo sapiens
TFIEDVNK

SEQ ID NO: 461 - protein, 15 aa, Homo sapiens
TFIEDVNKFLDMLIK

SEQ ID NO: 462 - protein, 16 aa, Homo sapiens
TFIEDVNKFLDMLIKK

SEQ ID NO: 463 - protein, 32 aa, Homo sapiens
TFQIPGYTVPVVNVEVSPFTIEMSAFGYVFPK

SEQ ID NO: 464 - protein, 10 aa, Homo sapiens
TGISPLALIK

SEQ ID NO: 465 - protein, 20 aa, Homo sapiens
TIDQMLNSELQWPVPDIYLR

SEQ ID NO: 466 - protein, 16 aa, Homo sapiens
TIHDLHLFIENIDFNK

SEQ ID NO: 467 - protein, 31 aa, Homo sapiens
TIHDLHLFIENIDFNKSGSSTASWIQNVDTK

SEQ ID NO: 468 - protein, 18 aa, Homo sapiens
TILGTMPAFEVSLQALQK

SEQ ID NO: 469 - protein, 13 aa, Homo sapiens
TLADLTLLDSPIK

SEQ ID NO: 470 - protein, 31 aa, Homo sapiens
TLADLTLLDSPIKVPLLLSEPINIIDALEMR

SEQ ID NO: 471 - protein, 14 aa, Homo sapiens
TLQGIPQMIGEVIR

SEQ ID NO: 472 - protein, 36 aa, Homo sapiens
TNPTGTQELLDIANYLMEQIQDDCTGDEDYTYLILR

SEQ ID NO: 473 - protein, 7 aa, Homo sapiens
TPALHFK

SEQ ID NO: 474 - protein, 18 aa, Homo sapiens
TQFNNNEYSQDLDAYNTK

SEQ ID NO: 475 - protein, 17 aa, Homo sapiens
TSQCTLKEVYGFNPEGK

SEQ ID NO: 476 - protein, 15 aa, Homo sapiens
TSSFALNLPTLPEVK

SEQ ID NO: 477 - protein, 24 aa, Homo sapiens
TSSFALNLPTLPEVKFPEVDVLTK

SEQ ID NO: 478 - protein, 11 aa, Homo sapiens
TTKQSFDLSVK

SEQ ID NO: 479 - protein, 21 aa, Homo sapiens
TTLTAFGFASADLIEIGLEGK

SEQ ID NO: 480 - protein, 9 aa, Homo sapiens
VAWHYDEEK

SEQ ID NO: 481 - protein, 23 aa, Homo sapiens
VAWHYDEEKIEFEWNTGTNVDTK

SEQ ID NO: 482 - protein, 8 aa, Homo sapiens
VEDIPLAR

SEQ ID NO: 483 - protein, 14 aa, Homo sapiens
VELEVPQLCSFILK

SEQ ID NO: 484 - protein, 27 aa, Homo sapiens
VHANPLLIDVVTYLVALIPEPSAQQLR

SEQ ID NO: 485 - protein, 24 aa, Homo sapiens
VHNGSEILFSYFQDLVITLPFELR

SEQ ID NO: 486 - protein, 25 aa, Homo sapiens
VHNGSEILFSYFQDLVITLPFELRK

SEQ ID NO: 487 - protein, 17 aa, Homo sapiens
VIGNMGQTMEQLTPELK

SEQ ID NO: 488 - protein, 16 aa, Homo sapiens
VKHLIDSLIDFLNFPR

SEQ ID NO: 489 - protein, 12 aa, Homo sapiens
VLADKFIIPGLK

SEQ ID NO: 490 - protein, 14 aa, Homo sapiens
VLLDQLGTTISFER

SEQ ID NO: 491 - protein, 10 aa, Homo sapiens
VLVDHFGYTK

SEQ ID NO: 492 - protein, 16 aa, Homo sapiens
VNQNLVYESGSLNFSK

SEQ ID NO: 493 - protein, 36 aa, Homo sapiens
VNQNLVYESGSLNFSKLEIQSQVDSQHVGHSVLTAK

SEQ ID NO: 494 - protein, 16 aa, Homo sapiens
VNWEEEAASGLLTSLK

SEQ ID NO: 495 - protein, 21 aa, Homo sapiens
VNWEEEAASGLLTSLKDNVPK

SEQ ID NO: 496 - protein, 18 aa, Homo sapiens
VPLLLSEPINIIDALEMR

SEQ ID NO: 497 - protein, 9 aa, Homo sapiens
VPQTDMTFR

SEQ ID NO: 498 - protein, 20 aa, Homo sapiens
VPSYTLILPSLELPVLHVPR

SEQ ID NO: 499 - protein, 15 aa, Homo sapiens
VSALLTPAEQTGTWK

SEQ ID NO: 500 - protein, 7 aa, Homo sapiens
VSSFYAK

SEQ ID NO: 501 - protein, 9 aa, Homo sapiens
VSTAFVYTK

SEQ ID NO: 502 - protein, 8 aa, Homo sapiens
VTQEFHMK

SEQ ID NO: 503 - protein, 13 aa, Homo sapiens
WNFYYSPQSSPDK

SEQ ID NO: 504 - protein, 14 aa, Homo sapiens
WNFYYSPQSSPDKK

SEQ ID NO: 505 - protein, 13 aa, Homo sapiens
YDFNSSMLYSTAK

SEQ ID NO: 506 - protein, 24 aa, Homo sapiens
YDKNQDVHSINLPFFETLQEYFER

SEQ ID NO: 507 - protein, 20 aa, Homo sapiens
YEDGTLSLTSTSDLQSGIIK

SEQ ID NO: 508 - protein, 26 aa, Homo sapiens
YEDGTLSLTSTSDLQSGIIKNTASLK

SEQ ID NO: 509 - protein, 10 aa, Homo sapiens
YEGLQEWEGK

SEQ ID NO: 510 - protein, 9 aa, Homo sapiens
YENYELTLK

SEQ ID NO: 511 - protein, 13 aa, Homo sapiens
YEVDQQIQVLMDK

SEQ ID NO: 512 - protein, 22 aa, Homo sapiens
YEVDQQIQVLMDKLVELAHQYK

SEQ ID NO: 513 - protein, 12 aa, Homo sapiens
YGMVAQVTQTLK

SEQ ID NO: 514 - protein, 27 aa, Homo sapiens
YHMKADSVVDLLSYNVQGSGETTYDHK

SEQ ID NO: 515 - protein, 11 aa, Homo sapiens
YHWEHTGLTLR

SEQ ID NO: 516 - protein, 16 aa, Homo sapiens
YKLQDFSDQLSDYYEK

SEQ ID NO: 517 - protein, 20 aa, Homo sapiens
YLRTEHGSEMLFFGNAIEGK

SEQ ID NO: 518 - protein, 25 aa, Homo sapiens
YLSLVGQVYSTLVTYISDWWTLAAK

SEQ ID NO: 519 - protein, 11 aa, Homo sapiens
YNALDLTNNGK

SEQ ID NO: 520 - protein, 13 aa, Homo sapiens
YNALDLTNNGKLR

SEQ ID NO: 521 - protein, 39 aa, Homo sapiens
YNQNFSAGNNENIMEAHVGINGEANLDFLNIPLTIPEMR

SEQ ID NO: 522 - protein, 16 aa, Homo sapiens
YRITENDIQIALDDAK

SEQ ID NO: 523 - protein, 30 aa, Homo sapiens
YSQPEDSLIPFFEITVPESQLTVSQFTLPK

SEQ ID NO: 524 - protein, 20 aa, Homo sapiens
YTYNYEAESSSGVPGTADSR

SEQ ID NO: 525 - protein, 7 aa, Homo sapiens
YYELEEK

SEQ ID NO: 526 - protein, 13 aa, Homo sapiens
YYELEEKIVSLIK

SEQ ID NO: 527 - protein, 9 aa, Homo sapiens
ARELISRIK

SEQ ID NO: 528 - protein, 9 aa, Homo sapiens
EFGNTLEDK

SEQ ID NO: 529 - protein, 9 aa, Homo sapiens
EWFSETFQK

SEQ ID NO: 530 - protein, 11 aa, Homo sapiens
LKEFGNTLEDK

SEQ ID NO: 531 - protein, 11 aa, Homo sapiens
MREWFSETFQK

SEQ ID NO: 532 - protein, 16 aa, Homo sapiens
DALSSVQESQVAQQAR

SEQ ID NO: 533 - protein, 14 aa, Homo sapiens
DKFSEFWDLDPEVR

SEQ ID NO: 534 - protein, 21 aa, Homo sapiens
DKFSEFWDLDPEVRPTSAVAA

SEQ ID NO: 535 - protein, 7 aa, Homo sapiens
DYWSTVK

SEQ ID NO: 536 - protein, 12 aa, Homo sapiens
FSEFWDLDPEVR

SEQ ID NO: 537 - protein, 19 aa, Homo sapiens
FSEFWDLDPEVRPTSAVAA

SEQ ID NO: 538 - protein, 11 aa, Homo sapiens
GWVTDGFSSLK

SEQ ID NO: 539 - protein, 18 aa, Homo sapiens
GWVTDGFSSLKDYWSTVK

SEQ ID NO: 540 - protein, 20 aa, Homo sapiens
GWVTDGFSSLKDYWSTVKDK

SEQ ID NO: 541 - protein, 19 aa, Homo sapiens
TAKDALSSVQESQVAQQAR

SEQ ID NO: 542 - protein, 7 aa, Homo sapiens
AWFLESK

SEQ ID NO: 543 - protein, 13 aa, Homo sapiens
DGWQWFWSPSTFR

SEQ ID NO: 544 - protein, 7 aa, Homo sapiens
DLGPLTK

SEQ ID NO: 545 - protein, 9 aa, Homo sapiens
ELLETVVNR

SEQ ID NO: 546 - protein, 12 aa, Homo sapiens
GFMQTYYDDHLR

SEQ ID NO: 547 - protein, 11 aa, Homo sapiens
MKELLETVVNR

SEQ ID NO: 548 - protein, 15 aa, Homo sapiens
AATVGSLAGQPLQER

SEQ ID NO: 549 - protein, 8 aa, Homo sapiens
ALMDETMK

SEQ ID NO: 550 - protein, 18 aa, Homo sapiens
AYKSELEEQLTPVAEETR

SEQ ID NO: 551 - protein, 14 aa, Homo sapiens
DRLDEVKEQVAEVR

SEQ ID NO: 552 - protein, 6 aa, Homo sapiens
FWDYLR

SEQ ID NO: 553 - protein, 18 aa, Homo sapiens
GEVQAMLGQSTEELRVER

SEQ ID NO: 554 - protein, 9 aa, Homo sapiens
LAVYQAGAR

SEQ ID NO: 555 - protein, 11 aa, Homo sapiens
LGADMEDVCGR

SEQ ID NO: 556 - protein, 9 aa, Homo sapiens
LGPLVEQGR

SEQ ID NO: 557 - protein, 9 aa, Homo sapiens
LQAEAFQAR

SEQ ID NO: 558 - protein, 8 aa, Homo sapiens
QWAGLVEK

SEQ ID NO: 559 - protein, 15 aa, Homo sapiens
SELEEQLTPVAEETR

SEQ ID NO: 560 - protein, 12 aa, Homo sapiens
SWFEPLVEDMQR

SEQ ID NO: 561 - protein, 14 aa, Homo sapiens
VEQAVETEPEPELR

SEQ ID NO: 562 - protein, 17 aa, Homo sapiens
VQAAVGTSAAPVPSDNH

SEQ ID NO: 563 - protein, 7 aa, Homo sapiens
WELALGR

SEQ ID NO: 564 - protein, 23 aa, Homo sapiens
WVQTLSEQVQEELLSSQVTQELR

SEQ ID NO: 565 - protein, 21 aa, Homo sapiens
ATFGCHDGYSLDGPEEIECTK

SEQ ID NO: 566 - protein, 32 aa, Homo sapiens
ATFGCHDGYSLDGPEEIECTKLGNWSAMPSCK

SEQ ID NO: 567 - protein, 9 aa, Homo sapiens
ATVVYQGER

SEQ ID NO: 568 - protein, 12 aa, Homo sapiens
CFKEHSSLAFWK

SEQ ID NO: 569 - protein, 17 aa, Homo sapiens
CPFPSRPDNGFVNYPAK

SEQ ID NO: 570 - protein, 23 aa, Homo sapiens
CPFPSRPDNGFVNYPAKPTLYYK

SEQ ID NO: 571 - protein, 18 aa, Homo sapiens
CSYTEDAQCIDGTIEVPK

SEQ ID NO: 572 - protein, 31 aa, Homo sapiens
CTEEGKWSPELPVCAPIICPPPSIPTFATLR

SEQ ID NO: 573 - protein, 23 aa, Homo sapiens
DKATFGCHDGYSLDGPEEIECTK

SEQ ID NO: 574 - protein, 34 aa, Homo sapiens
DKATFGCHDGYSLDGPEEIECTKLGNWSAMPSCK

SEQ ID NO: 575 - protein, 29 aa, Homo sapiens
DTAVFECLPQHAMFGNDTITCTTHGNWTK

SEQ ID NO: 576 - protein, 34 aa, Homo sapiens
DTAVFECLPQHAMFGNDTITCTTHGNWTKLPECR

SEQ ID NO: 577 - protein, 9 aa, Homo sapiens
EHSSLAFWK

SEQ ID NO: 578 - protein, 15 aa, Homo sapiens
FICPLTGLWPINTLK

SEQ ID NO: 579 - protein, 19 aa, Homo sapiens
KCSYTEDAQCIDGTIEVPK

SEQ ID NO: 580 - protein, 16 aa, Homo sapiens
KFICPLTGLWPINTLK

SEQ ID NO: 581 - protein, 11 aa, Homo sapiens
LGNWSAMPSCK

SEQ ID NO: 582 - protein, 13 aa, Homo sapiens
PDDLPFSTVVPLK

SEQ ID NO: 583 - protein, 11 aa, Homo sapiens
PDNGFVNYPAK

SEQ ID NO: 584 - protein, 17 aa, Homo sapiens
PDNGFVNYPAKPTLYYK

SEQ ID NO: 585 - protein, 10 aa, Homo sapiens
PSAGNNSLYR

SEQ ID NO: 586 - protein, 6 aa, Homo sapiens
PTLYYK

SEQ ID NO: 587 - protein, 17 aa, Homo sapiens
TCPKPDDLPFSTVVPLK

SEQ ID NO: 588 - protein, 9 aa, Homo sapiens
TDASDVKPC

SEQ ID NO: 589 - protein, 14 aa, Homo sapiens
TFYEPGEEITYSCK

SEQ ID NO: 590 - protein, 20 aa, Homo sapiens
TFYEPGEEITYSCKPGYVSR

SEQ ID NO: 591 - protein, 14 aa, Homo sapiens
VCPFAGILENGAVR

SEQ ID NO: 592 - protein, 13 aa, Homo sapiens
VYKPSAGNNSLYR

SEQ ID NO: 593 - protein, 42 aa, Homo sapiens
VYKPSAGNNSLYRDTAVFECLPQHAMFGNDTITCTTHGNWTK

SEQ ID NO: 594 - protein, 25 aa, Homo sapiens
WSPELPVCAPIICPPPSIPTFATLR

SEQ ID NO: 595 - protein, 27 aa, Homo sapiens
YTTFEYPNTISFSCNTGFYLNGADSAK

SEQ ID NO: 596 - protein, 7 aa, Homo sapiens
AFLLTPR

SEQ ID NO: 597 - protein, 7 aa, Homo sapiens
DGLCVPR

SEQ ID NO: 598 - protein, 28 aa, Homo sapiens
EELATFDPVDNIVFNMAAGSAPMQLHLR

SEQ ID NO: 599 - protein, 20 aa, Homo sapiens
EFPEVHLGQWYFIAGAAPTK

SEQ ID NO: 600 - protein, 48 aa, Homo sapiens
EFPEVHLGQWYFIAGAAPTKEELATFDPVDNIVFNMAAGSAPMQLHLR

SEQ ID NO: 601 - protein, 6 aa, Homo sapiens
FLLYNR

SEQ ID NO: 602 - protein, 14 aa, Homo sapiens
KWIYHLTEGSTDLR

SEQ ID NO: 603 - protein, 13 aa, Homo sapiens
MAAGSAPMQLHLR

SEQ ID NO: 604 - protein, 37 aa, Homo sapiens
MFHQIWAALLYFYGIILNSIYQCPEHSQLTTLGVDGK

SEQ ID NO: 605 - protein, 10 aa, Homo sapiens
NQEACELSNN

SEQ ID NO: 606 - protein, 9 aa, Homo sapiens
SLTSCLDSK

SEQ ID NO: 607 - protein, 31 aa, Homo sapiens
TEGRPDMKTELFSSSCPGGIMLNETGQGYQR

SEQ ID NO: 608 - protein, 23 aa, Homo sapiens
TELFSSSCPGGIMLNETGQGYQR

SEQ ID NO: 609 - protein, 13 aa, Homo sapiens
WIYHLTEGSTDLR

SEQ ID NO: 610 - protein, 15 aa, Homo sapiens
ETFSNFTASTEAQVK

SEQ ID NO: 611 - protein, 16 aa, Homo sapiens
LEDAHLVVVTSWEEQK

SEQ ID NO: 612 - protein, 16 aa, Homo sapiens
SLSCQMAALQGNGSER

SEQ ID NO: 613 - protein, 11 aa, Homo sapiens
ADHDALLFHLK

SEQ ID NO: 614 - protein, 27 aa, Homo sapiens
EAFSNFSSSTLTEVQAISTHGGSVGDK

SEQ ID NO: 615 - protein, 23 aa, Homo sapiens
FIVQHTNPFNTWIGLTDSDGSWK

SEQ ID NO: 616 - protein, 16 aa, Homo sapiens
FVACQMELLHSNGSQR

SEQ ID NO: 617 - protein, 29 aa, Homo sapiens
NWAVTQPDNWHGHELGGSEDCVEVQPDGR

SEQ ID NO: 618 - protein, 22 aa, Homo sapiens
TCCPVNWVEHQGSCYWFSHSGK

SEQ ID NO: 619 - protein, 11 aa, Homo sapiens
WNDDFCLQVYR

SEQ ID NO: 620 - protein, 19 aa, Homo sapiens
YCQLENAHLVVINSWEEQK

SEQ ID NO: 621 - protein, 15 aa, Homo sapiens
AATCINPLNGSVCER

SEQ ID NO: 622 - protein, 22 aa, Homo sapiens
AATCINPLNGSVCERPANHSAK

SEQ ID NO: 623 - protein, 32 aa, Homo sapiens
AVVNGNIMWVVGGYMFNHSDYNMVLAYDLASR

SEQ ID NO: 624 - protein, 15 aa, Homo sapiens
CFSSDFMAYDIACDR

SEQ ID NO: 625 - protein, 25 aa, Homo sapiens
CNPGTGQCVCPAGWVGEQCQHCGGR

SEQ ID NO: 626 - protein, 11 aa, Homo sapiens
CTWLIEGQPNR

SEQ ID NO: 627 - protein, 23 aa, Homo sapiens
CVWNTGSSQCISWALATDEQEEK

SEQ ID NO: 628 - protein, 47 aa, Homo sapiens
DGNETVPEVVATSGYALLHFFSDAAYNLTGFNITYSFDMCPNNCSGR

SEQ ID NO: 629 - protein, 10 aa, Homo sapiens
DLDMFINASK

SEQ ID NO: 630 - protein, 9 aa, Homo sapiens
DNPMYYCNK

SEQ ID NO: 631 - protein, 10 aa, Homo sapiens
EEYSNLKLPR

SEQ ID NO: 632 - protein, 16 aa, Homo sapiens
EQYAVVGHSAHIVTLK

SEQ ID NO: 633 - protein, 38 aa, Homo sapiens
FGHSAVLHNSTMYVFGGFNSLLLSDILVFTSEQCDAHR

SEQ ID NO: 634 - protein, 37 aa, Homo sapiens
FNHFATECSWDHLYVYDGDSIYAPLVAAFSGLIVPER

SEQ ID NO: 635 - protein, 26 aa, Homo sapiens
GCSCFSDWQGPGCSVPVPANQSFWTR

SEQ ID NO: 636 - protein, 12 aa, Homo sapiens
GDECQLCEVENR

SEQ ID NO: 637 - protein, 18 aa, Homo sapiens
GEACDIPHCTDNCGFPHR

SEQ ID NO: 638 - protein, 30 aa, Homo sapiens
GPVKMPSQAPTGNFYPQPLLNSSMCLEDSR

SEQ ID NO: 639 - protein, 18 aa, Homo sapiens
HCETCISGFYGDPTNGGK

SEQ ID NO: 640 - protein, 12 aa, Homo sapiens
IDSTGNVTNELR

SEQ ID NO: 641 - protein, 27 aa, Homo sapiens
IDSTGNVTNELRVFHIHNESWVLLTPK

SEQ ID NO: 642 - protein, 41 aa, Homo sapiens
INVSYWCWEDMSPFTNSLLQWMPSEPSDAGFCGILSEPSTR

SEQ ID NO: 643 - protein, 17 aa, Homo sapiens
ISNSSDTVECECSENWK

SEQ ID NO: 644 - protein, 42 aa, Homo sapiens
KINVSYWCWEDMSPFTNSLLQWMPSEPSDAGFCGILSEPSTR

SEQ ID NO: 645 - protein, 7 aa, Homo sapiens
KVEFVLK

SEQ ID NO: 646 - protein, 19 aa, Homo sapiens
LADDLYRYDVDTQMWTILK

SEQ ID NO: 647 - protein, 22 aa, Homo sapiens
LADDLYRYDVDTQMWTILKDSR

SEQ ID NO: 648 - protein, 16 aa, Homo sapiens
LTGSSGFVTDGPGNYK

SEQ ID NO: 649 - protein, 10 aa, Homo sapiens
LTLTPWVGLR

SEQ ID NO: 650 - protein, 26 aa, Homo sapiens
MPSQAPTGNFYPQPLLNSSMCLEDSR

SEQ ID NO: 651 - protein, 27 aa, Homo sapiens
NFNLNITWAASFSAGTQAGEEMPVVSK

SEQ ID NO: 652 - protein, 13 aa, Homo sapiens
NHNALLASLTTQK

SEQ ID NO: 653 - protein, 19 aa, Homo sapiens
NHPNITFFVYVSNFTWPIK

SEQ ID NO: 654 - protein, 13 aa, Homo sapiens
NHSCSEGQISIFR

SEQ ID NO: 655 - protein, 25 aa, Homo sapiens
NQECIALPENICGIGWHLVGNSCLK

SEQ ID NO: 656 - protein, 26 aa, Homo sapiens
NTWSILHTQGALVQGGYGHSSVYDHR

SEQ ID NO: 657 - protein, 13 aa, Homo sapiens
SCALDQNCQWEPR

SEQ ID NO: 658 - protein, 13 aa, Homo sapiens
SEAACLAAGPGIR

SEQ ID NO: 659 - protein, 8 aa, Homo sapiens
SVNNVVVR

SEQ ID NO: 660 - protein, 20 aa, Homo sapiens
TACGDCTSGSSECMWCSNMK

SEQ ID NO: 661 - protein, 15 aa, Homo sapiens
VFHIHNESWVLLTPK

SEQ ID NO: 662 - protein, 26 aa, Homo sapiens
VVMLVIFGHCPLYGYISNVQEYDLDK

SEQ ID NO: 663 - protein, 15 aa, Homo sapiens
WSVLPRPDLHHDVNR

SEQ ID NO: 664 - protein, 12 aa, Homo sapiens
YDVDTQMWTILK

SEQ ID NO: 665 - protein, 15 aa, Homo sapiens
YDVDTQMWTILKDSR

SEQ ID NO: 666 - protein, 9 aa, Homo sapiens
YGHSLALYK

SEQ ID NO: 667 - protein, 30 aa, Homo sapiens
YLHTAVIVSGTMLVFGGNTHNDTSMSHGAK

SEQ ID NO: 668 - protein, 18 aa, Homo sapiens
YNWSFIHCPACQCNGHSK

SEQ ID NO: 669 - protein, 16 aa, Homo sapiens
YYTAINFVATPDEQNR

SEQ ID NO: 670 - protein, 26 aa, Homo sapiens
YYTAINFVATPDEQNRDLDMFINASK

SEQ ID NO: 671 - protein, 25 aa, Homo sapiens
EANLTSSVTILPLPLQNATVEAGTR

SEQ ID NO: 672 - protein, 13 aa, Homo sapiens
FVNVTVTPEDQCR

SEQ ID NO: 673 - protein, 24 aa, Homo sapiens
FVNVTVTPEDQCRPNNVCTGVLTR

SEQ ID NO: 674 - protein, 13 aa, Homo sapiens
CRNYSLLIDQPDK

SEQ ID NO: 675 - protein, 15 aa, Homo sapiens
DLFIGDVIHNAGPHR

SEQ ID NO: 676 - protein, 9 aa, Homo sapiens
DTFFNLSLK

SEQ ID NO: 677 - protein, 16 aa, Homo sapiens
ESWGQESNAGNQTVVR

SEQ ID NO: 678 - protein, 18 aa, Homo sapiens
KPQEMIDIWSQLQSAHLK

SEQ ID NO: 679 - protein, 15 aa, Homo sapiens
LSNISHLNYCEPDLR

SEQ ID NO: 680 - protein, 18 aa, Homo sapiens
QYNPILSMLTNQTGEAGR

SEQ ID NO: 681 - protein, 14 aa, Homo sapiens
VTSVVTGFNNLPDR

SEQ ID NO: 682 - protein, 14 aa, Homo sapiens
WVSTSCPDTEFVFK

SEQ ID NO: 683 - protein, 24 aa, Homo sapiens
DYDYTCFVFSDVDLIPMNDHNAYR

SEQ ID NO: 684 - protein, 20 aa, Homo sapiens
ETMLSDGLNSLTYQVLDVQR

SEQ ID NO: 685 - protein, 19 aa, Homo sapiens
FGFSLPYVQYFGGVSALSK

SEQ ID NO: 686 - protein, 11 aa, Homo sapiens
LLNVGFQEALK

SEQ ID NO: 687 - protein, 29 aa, Homo sapiens
LPQLVGVSTPLQGGSNSAAAIGQSSGELR

SEQ ID NO: 688 - protein, 20 aa, Homo sapiens
QQLDYGIYVINQAGDTIFNR

SEQ ID NO: 689 - protein, 12 aa, Homo sapiens
YWLYYLHPVLQR

SEQ ID NO: 690 - protein, 21 aa, Homo sapiens
AILQSGSFNAPWAVTSLYEAR

SEQ ID NO: 691 - protein, 16 aa, Homo sapiens
DEGTAFLVYGAPGFSK

SEQ ID NO: 692 - protein, 8 aa, Homo sapiens
DNNSIITR

SEQ ID NO: 693 - protein, 12 aa, Homo sapiens
DNYTKAEEILSR

SEQ ID NO: 694 - protein, 21 aa, Homo sapiens
EALGDVVGDYNFICPALEFTK

SEQ ID NO: 695 - protein, 8 aa, Homo sapiens
ENETEIIK

SEQ ID NO: 696 - protein, 20 aa, Homo sapiens
ESILFHYTDWVDDQRPENYR

SEQ ID NO: 697 - protein, 16 aa, Homo sapiens
FSEWGNNAFFYYFEHR

SEQ ID NO: 698 - protein, 8 aa, Homo sapiens
FWTSFFPK

SEQ ID NO: 699 - protein, 26 aa, Homo sapiens
GMNLTVFGGTVTAFLGIPYAQPPLGR

SEQ ID NO: 700 - protein, 11 aa, Homo sapiens
IFFPGVSEFGK

SEQ ID NO: 701 - protein, 25 aa, Homo sapiens
LPWPEWMGVMHGYEIEFVFGLPLER

SEQ ID NO: 702 - protein, 10 aa, Homo sapiens
NIAAFGGNPK

SEQ ID NO: 703 - protein, 48 aa, Homo sapiens
NKDPQEILLNEAFVVPYGTPLSVNFGPTVDGDFLTDMPDILLELGQFK

SEQ ID NO: 704 - protein, 9 aa, Homo sapiens
NQFNDYTSK

SEQ ID NO: 705 - protein, 29 aa, Homo sapiens
SVTLFGESAGAASVSLHLLSPGSHSLFTR

SEQ ID NO: 706 - protein, 9 aa, Homo sapiens
TQILVGVNK

SEQ ID NO: 707 - protein, 25 aa, Homo sapiens
TQILVGVNKDEGTAFLVYGAPGFSK

SEQ ID NO: 708 - protein, 33 aa, Homo sapiens
VGALGFLALPGNPEAPGNMGLFDQQLALQWVQK

SEQ ID NO: 709 - protein, 9 aa, Homo sapiens
VIVVSMNYR

SEQ ID NO: 710 - protein, 16 aa, Homo sapiens
VLEMTGNIDEAEWEWK

SEQ ID NO: 711 - protein, 9 aa, Homo sapiens
WNNYMMDWK

SEQ ID NO: 712 - protein, 9 aa, Homo sapiens
WSDIWNATK

SEQ ID NO: 713 - protein, 43 aa, Homo sapiens
YANSCCQNIDQSFPGFHGSEMWNPNTDLSEDCLYLNVWIPAPK

SEQ ID NO: 714 - protein, 18 aa, Homo sapiens
YGNPNETQNNSTSWPVFK

SEQ ID NO: 715 - protein, 10 aa, Homo sapiens
YLTLNTESTR

SEQ ID NO: 716 - protein, 26 aa, Homo sapiens
AAVAAVLSPEEFMVLLDSVLPESAHR

SEQ ID NO: 717 - protein, 13 aa, Homo sapiens
ALGFEAAESSLTK

SEQ ID NO: 718 - protein, 32 aa, Homo sapiens
ALGFEAAESSLTKDALVLTPASLWKPSSPVSQ

SEQ ID NO: 719 - protein, 18 aa, Homo sapiens
DHNATSILQQLPLLSAMR

SEQ ID NO: 720 - protein, 19 aa, Homo sapiens
EKPAGGIPVLGSLVNTVLK

SEQ ID NO: 721 - protein, 15 aa, Homo sapiens
GDQLILNLNNISSDR

SEQ ID NO: 722 - protein, 17 aa, Homo sapiens
ILTQDTPEFFIDQGHAK

SEQ ID NO: 723 - protein, 17 aa, Homo sapiens
IQLMNSGIGWFQPDVLK

SEQ ID NO: 724 - protein, 11 aa, Homo sapiens
LEFDLLYPAIK

SEQ ID NO: 725 - protein, 14 aa, Homo sapiens
LVLSDCATSHGSLR

SEQ ID NO: 726 - protein, 18 aa, Homo sapiens
NIITEIIHSILLPNQNGK

SEQ ID NO: 727 - protein, 16 aa, Homo sapiens
TIVEFHMTTEAQATIR

SEQ ID NO: 728 - protein, 9 aa, Homo sapiens
VPISLSIDR

SEQ ID NO: 729 - protein, 29 aa, Homo sapiens
WFNNSAASLTMPTLDNIPFSLIVSQDVVK

SEQ ID NO: 730 - protein, 18 aa, Homo sapiens
ILLTCSLNDSATEVTGHR

SEQ ID NO: 731 - protein, 18 aa, Homo sapiens
SELHIENLNMEADPGQYR

SEQ ID NO: 732 - protein, 19 aa, Homo sapiens
DVQIIVFPEDGIHGFNFTR

SEQ ID NO: 733 - protein, 9 aa, Homo sapiens
FNDTEVLQR

SEQ ID NO: 734 - protein, 12 aa, Homo sapiens
GDMFLVANLGTK

SEQ ID NO: 735 - protein, 14 aa, Homo sapiens
HNLYFEAAFDVPLK

SEQ ID NO: 736 - protein, 22 aa, Homo sapiens
HVVYPTAWMNQLPLLAAIEIQK

SEQ ID NO: 737 - protein, 22 aa, Homo sapiens
ILSGDPYCEKDAQEVHCDEATK

SEQ ID NO: 738 - protein, 15 aa, Homo sapiens
KHNLYFEAAFDVPLK

SEQ ID NO: 739 - protein, 13 aa, Homo sapiens
LSSGLVTAALYGR

SEQ ID NO: 740 - protein, 21 aa, Homo sapiens
NPVGLIGAENATGETDPSHSK

SEQ ID NO: 741 - protein, 24 aa, Homo sapiens
QEALELMNQNLDIYEQQVMTAAQK

SEQ ID NO: 742 - protein, 10 aa, Homo sapiens
SHLIIAQVAK

SEQ ID NO: 743 - protein, 17 aa, Homo sapiens
TSIYPFLDFMPSPQVVR

SEQ ID NO: 744 - protein, 13 aa, Homo sapiens
VDLITFDTPFAGR

SEQ ID NO: 745 - protein, 9 aa, Homo sapiens
WNPCLEPHR

SEQ ID NO: 746 - protein, 18 aa, Homo sapiens
WNPCLEPHRFNDTEVLQR

SEQ ID NO: 747 - protein, 26 aa, Homo sapiens
WNVNAPPTFHSEMMYDNFTLVPVWGK

SEQ ID NO: 748 - protein, 18 aa, Homo sapiens
YQFNTNVVFSNNGTLVDR

SEQ ID NO: 749 - protein, 15 aa, Homo sapiens
CLPVCGKPVNPVEQR

SEQ ID NO: 750 - protein, 24 aa, Homo sapiens
EHEAQSNASLDVFLGHTNVEELMK

SEQ ID NO: 751 - protein, 16 aa, Homo sapiens
ESEQGVYTCTAQGIWK

SEQ ID NO: 752 - protein, 15 aa, Homo sapiens
FCGQLGSPLGNPPGK

SEQ ID NO: 753 - protein, 16 aa, Homo sapiens
FCGQLGSPLGNPPGKK

SEQ ID NO: 754 - protein, 27 aa, Homo sapiens
FLEPFDIDDHQQVHCPYDQLQIYANGK

SEQ ID NO: 755 - protein, 17 aa, Homo sapiens
FVRLPVANPQACENWLR

SEQ ID NO: 756 - protein, 17 aa, Homo sapiens
GFLAYYQAVDLDECASR

SEQ ID NO: 757 - protein, 21 aa, Homo sapiens
GGGALLGDRWILTAAHTLYPK

SEQ ID NO: 758 - protein, 7 aa, Homo sapiens
GLTLHLK

SEQ ID NO: 759 - protein, 7 aa, Homo sapiens
GYGFYTK

SEQ ID NO: 760 - protein, 11 aa, Homo sapiens
IQYYCHEPYYK

SEQ ID NO: 761 - protein, 12 aa, Homo sapiens
LFGEVTSPLFPK

SEQ ID NO: 762 - protein, 31 aa, Homo sapiens
LFGEVTSPLFPKPYPNNFETTTVITVPTGYR

SEQ ID NO: 763 - protein, 14 aa, Homo sapiens
LPVANPQACENWLR

SEQ ID NO: 764 - protein, 20 aa, Homo sapiens
LVFQQFDLEPSEGCFYDYVK

SEQ ID NO: 765 - protein, 17 aa, Homo sapiens
MDVFSQNMFCAGHPSLK

SEQ ID NO: 766 - protein, 15 aa, Homo sapiens
MGNFPWQVFTNIHGR

SEQ ID NO: 767 - protein, 21 aa, Homo sapiens
MLLTFHTDFSNEENGTIMFYK

SEQ ID NO: 768 - protein, 19 aa, Homo sapiens
PYPNNFETTTVITVPTGYR

SEQ ID NO: 769 - protein, 15 aa, Homo sapiens
QDACQGDSGGVFAVR

SEQ ID NO: 770 - protein, 55 aa, Homo sapiens
QDESYNFEGDIALLELENSVTLGPNLLPICLPDNDTFYDLGLMGYVSGFGVMEEK

SEQ ID NO: 771 - protein, 27 aa, Homo sapiens
QGYQLIEGNQVLHSFTAVCQDDGTWHR

SEQ ID NO: 772 - protein, 26 aa, Homo sapiens
QRPPDLDTSSNAVDLLFFTDESGDSR

SEQ ID NO: 773 - protein, 26 aa, Homo sapiens
SGEEDPQPQCQHLCHNYVGGYFCSCR

SEQ ID NO: 774 - protein, 18 aa, Homo sapiens
TLDEFTIIQNLQPQYQFR

SEQ ID NO: 775 - protein, 9 aa, Homo sapiens
VLNYVDWIK

SEQ ID NO: 776 - protein, 10 aa, Homo sapiens
VLNYVDWIKK

SEQ ID NO: 777 - protein, 12 aa, Homo sapiens
WILTAAHTLYPK

SEQ ID NO: 778 - protein, 15 aa, Homo sapiens
WVATGIVSWGIGCSR

SEQ ID NO: 779 - protein, 7 aa, Homo sapiens
YTTEIIK

SEQ ID NO: 780 - protein, 11 aa, Homo sapiens
YTTTMGVNTYK

SEQ ID NO: 781 - protein, 6 aa, Homo sapiens
CEYQIR

SEQ ID NO: 782 - protein, 16 aa, Homo sapiens
CQPVDCGIPESIENGK

SEQ ID NO: 783 - protein, 30 aa, Homo sapiens
CQPVDCGIPESIENGKVEDPESTLFGSVIR

SEQ ID NO: 784 - protein, 9 aa, Homo sapiens
CVPVCGVPR

SEQ ID NO: 785 - protein, 17 aa, Homo sapiens
DVVQITCLDGFEVVEGR

SEQ ID NO: 786 - protein, 25 aa, Homo sapiens
EDFDVEAADSAGNCLDSLVFVAGDR

SEQ ID NO: 787 - protein, 12 aa, Homo sapiens
EDTPNSVWEPAK

SEQ ID NO: 788 - protein, 15 aa, Homo sapiens
EPTMYVGSTSVQTSR

SEQ ID NO: 789 - protein, 21 aa, Homo sapiens
FYAAGLVSWGPQCGTYGLYTR

SEQ ID NO: 790 - protein, 15 aa, Homo sapiens
GDSGGAFAVQDPNDK

SEQ ID NO: 791 - protein, 9 aa, Homo sapiens
GFQVVVTLR

SEQ ID NO: 792 - protein, 10 aa, Homo sapiens
IIGGSDADIK

SEQ ID NO: 793 - protein, 8 aa, Homo sapiens
LLEVPEGR

SEQ ID NO: 794 - protein, 7 aa, Homo sapiens
LPVAPLR

SEQ ID NO: 795 - protein, 6 aa, Homo sapiens
LQVIFK

SEQ ID NO: 796 - protein, 32 aa, Homo sapiens
MGPTVSPICLPGTSSDYNLMDGDLGLISGWGR

SEQ ID NO: 797 - protein, 14 aa, Homo sapiens
MLTPEHVFIHPGWK

SEQ ID NO: 798 - protein, 25 aa, Homo sapiens
NCGVNCSGDVFTALIGEIASPNYPK

SEQ ID NO: 799 - protein, 32 aa, Homo sapiens
NCGVNCSGDVFTALIGEIASPNYPKPYPENSR

SEQ ID NO: 800 - protein, 38 aa, Homo sapiens
NCGVNCSGDVFTALIGEIASPNYPKPYPENSRCEYQIR

SEQ ID NO: 801 - protein, 34 aa, Homo sapiens
NFPWQVFFDNPWAGGALINEYWVLTAAHVVEGNR

SEQ ID NO: 802 - protein, 8 aa, Homo sapiens
NYVDWIMK

SEQ ID NO: 803 - protein, 19 aa, Homo sapiens
QFGPYCGHGFPGPLNIETK

SEQ ID NO: 804 - protein, 26 aa, Homo sapiens
REDFDVEAADSAGNCLDSLVFVAGDR

SEQ ID NO: 805 - protein, 16 aa, Homo sapiens
SNALDIIFQTDLTGQK

SEQ ID NO: 806 - protein, 19 aa, Homo sapiens
SSNNPHSPIVEEFQVPYNK

SEQ ID NO: 807 - protein, 43 aa, Homo sapiens
SWDIEVPEGYGIHLYFTHLDIELSENCAYDSVQIISGDTEEGR

SEQ ID NO: 808 - protein, 11 aa, Homo sapiens
TNFDNDIALVR

SEQ ID NO: 809 - protein, 14 aa, Homo sapiens
VEDPESTLFGSVIR

SEQ ID NO: 810 - protein, 24 aa, Homo sapiens
VEKPTADAEAYVFTPNMICAGGEK

SEQ ID NO: 811 - protein, 15 aa, Homo sapiens
VGATSFYSTCQSNGK

SEQ ID NO: 812 - protein, 22 aa, Homo sapiens
YHGDPMPCPKEDTPNSVWEPAK

SEQ ID NO: 813 - protein, 37 aa, Homo sapiens
YTCEEPYYYMENGGGGEYHCAGNGSWVNEVLGPELPK

SEQ ID NO: 814 - protein, 12 aa, Homo sapiens
AKDLHLSDVFLK

SEQ ID NO: 815 - protein, 16 aa, Homo sapiens
ALNHLPLEYNSALYSR

SEQ ID NO: 816 - protein, 19 aa, Homo sapiens
CLNNQQLHFLHIGSCQDGR

SEQ ID NO: 817 - protein, 8 aa, Homo sapiens
CLPDGTWR

SEQ ID NO: 818 - protein, 22 aa, Homo sapiens
CPINCLLGDFGPWSDCDPCIEK

SEQ ID NO: 819 - protein, 11 aa, Homo sapiens
CVCLLPPQCFK

SEQ ID NO: 820 - protein, 10 aa, Homo sapiens
DLHLSDVFLK

SEQ ID NO: 821 - protein, 32 aa, Homo sapiens
DLTSLGHNENQQGSFSSQGGSSFSVPIFYSSK

SEQ ID NO: 822 - protein, 9 aa, Homo sapiens
ECNNPAPQR

SEQ ID NO: 823 - protein, 18 aa, Homo sapiens
ENPAVIDFELAPIVDLVR

SEQ ID NO: 824 - protein, 13 aa, Homo sapiens
ESCGYDTCYDWEK

SEQ ID NO: 825 - protein, 25 aa, Homo sapiens
EVDLPEIEADSGCPQPVPPENGFIR

SEQ ID NO: 826 - protein, 14 aa, Homo sapiens
GEVLDNSFTGGICK

SEQ ID NO: 827 - protein, 9 aa, Homo sapiens
GFVVAGPSR

SEQ ID NO: 828 - protein, 9 aa, Homo sapiens
GGNQLYCVK

SEQ ID NO: 829 - protein, 7 aa, Homo sapiens
IEEADCK

SEQ ID NO: 830 - protein, 31 aa, Homo sapiens
IFDDFGTHYFTSGSLGGVYDLLYQFSSEELK

SEQ ID NO: 831 - protein, 41 aa, Homo sapiens
IFDDFGTHYFTSGSLGGVYDLLYQFSSEELKNSGLTEEEAK

SEQ ID NO: 832 - protein, 11 aa, Homo sapiens
IGESIELTCPK

SEQ ID NO: 833 - protein, 14 aa, Homo sapiens
KESCGYDTCYDWEK

SEQ ID NO: 834 - protein, 17 aa, Homo sapiens
KLECNGENDCGDNSDER

SEQ ID NO: 835 - protein, 23 aa, Homo sapiens
KYNPIPSVQLMGNGFHFLAGEPR

SEQ ID NO: 836 - protein, 23 aa, Homo sapiens
PSQFGGQPCTAPLVAFQPCIPSK

SEQ ID NO: 837 - protein, 8 aa, Homo sapiens
QAIQASHK

SEQ ID NO: 838 - protein, 8 aa, Homo sapiens
QLEWGLER

SEQ ID NO: 839 - protein, 26 aa, Homo sapiens
QLYLVGEDVEISCLTGFETVGYQYFR

SEQ ID NO: 840 - protein, 26 aa, Homo sapiens
RQEEDCTFSIMENNGQPCINDDEEMK

SEQ ID NO: 841 - protein, 51 aa, Homo sapiens
RQEEDCTFSIMENNGQPCINDDEEMKEVDLPEIEADSGCPQPVPPENGFIR

SEQ ID NO: 842 - protein, 11 aa, Homo sapiens
SEYGAALAWEK

SEQ ID NO: 843 - protein, 22 aa, Homo sapiens
SNAVDGQWGCWSSWSTCDATYK

SEQ ID NO: 844 - protein, 27 aa, Homo sapiens
SVLRPSQFGGQPCTAPLVAFQPCIPSK

SEQ ID NO: 845 - protein, 10 aa, Homo sapiens
TFSEWLESVK

SEQ ID NO: 846 - protein, 28 aa, Homo sapiens
TFSEWLESVKENPAVIDFELAPIVDLVR

SEQ ID NO: 847 - protein, 11 aa, Homo sapiens
TLNICEVGTIR

SEQ ID NO: 848 - protein, 7 aa, Homo sapiens
VLNFTTK

SEQ ID NO: 849 - protein, 20 aa, Homo sapiens
VPANLENVGFEVQTAEDDLK

SEQ ID NO: 850 - protein, 25 aa, Homo sapiens
VPANLENVGFEVQTAEDDLKTDFYK

SEQ ID NO: 851 - protein, 22 aa, Homo sapiens
YNPIPSVQLMGNGFHFLAGEPR

SEQ ID NO: 852 - protein, 20 aa, Homo sapiens
YTCQGNSWTPPISNSLTCEK

SEQ ID NO: 853 - protein, 13 aa, Homo sapiens
YYQENFCEQICSK

SEQ ID NO: 854 - protein, 9 aa, Homo sapiens
DAVNNITAK

SEQ ID NO: 855 - protein, 17 aa, Homo sapiens
EPVTLDFLDAELENDIK

SEQ ID NO: 856 - protein, 16 aa, Homo sapiens
GFSFAFEQLLNYNVSR

SEQ ID NO: 857 - protein, 12 aa, Homo sapiens
HLVNISVYAFNK

SEQ ID NO: 858 - protein, 12 aa, Homo sapiens
IDVNSWIENFTK

SEQ ID NO: 859 - protein, 18 aa, Homo sapiens
ISDNNTEFLLNFNEFIDR

SEQ ID NO: 860 - protein, 19 aa, Homo sapiens
LLIQAEQTSDGPNPCDMVK

SEQ ID NO: 861 - protein, 21 aa, Homo sapiens
NREEDPSLLWQVFGSATGLAR

SEQ ID NO: 862 - protein, 15 aa, Homo sapiens
PDNFEESGYTFIAPR

SEQ ID NO: 863 - protein, 13 aa, Homo sapiens
SFSGVLDCGNCSR

SEQ ID NO: 864 - protein, 16 aa, Homo sapiens
SLDNDNYVFTAPYFNK

SEQ ID NO: 865 - protein, 15 aa, Homo sapiens
SYDYQSVCEPGAAPK

SEQ ID NO: 866 - protein, 9 aa, Homo sapiens
EALNMLTWR

SEQ ID NO: 867 - protein, 32 aa, Homo sapiens
FLVTAPGIIRPGGNVTIGVELLEHCPSQVTVK

SEQ ID NO: 868 - protein, 22 aa, Homo sapiens
GISDNYTLALITYALSSVGSPK

SEQ ID NO: 869 - protein, 9 aa, Homo sapiens
HLNGTITAK

SEQ ID NO: 870 - protein, 15 aa, Homo sapiens
IEFPILEDSSELQLK

SEQ ID NO: 871 - protein, 15 aa, Homo sapiens
INGSANFSFNDEEMK

SEQ ID NO: 872 - protein, 12 aa, Homo sapiens
INYTVPQSGTFK

SEQ ID NO: 873 - protein, 8 aa, Homo sapiens
IPVQLVFK

SEQ ID NO: 874 - protein, 17 aa, Homo sapiens
ISVTQPDSIVGIVAVDK

SEQ ID NO: 875 - protein, 12 aa, Homo sapiens
IVTLFSDFKPYK

SEQ ID NO: 876 - protein, 21 aa, Homo sapiens
LNLYLDSVNETQFCVNIPAVR

SEQ ID NO: 877 - protein, 15 aa, Homo sapiens
NYTEYWSGSNSGNQK

SEQ ID NO: 878 - protein, 22 aa, Homo sapiens
PGGNVTIGVELLEHCPSQVTVK

SEQ ID NO: 879 - protein, 26 aa, Homo sapiens
QHDYIIEFFDYTTVLKPSLNFTATVK

SEQ ID NO: 880 - protein, 17 aa, Homo sapiens
QNSTMFSLTPENSWTPK

SEQ ID NO: 881 - protein, 36 aa, Homo sapiens
SGMALMEVNLLSGFMVPSEAISLSETVKKVEYDHGK

SEQ ID NO: 882 - protein, 19 aa, Homo sapiens
SNLIQQWLSQQSDLGVISK

SEQ ID NO: 883 - protein, 18 aa, Homo sapiens
TASNLTVSVLEAEGVFEK

SEQ ID NO: 884 - protein, 19 aa, Homo sapiens
TLTLPSLPLNSADEIYELR

SEQ ID NO: 885 - protein, 17 aa, Homo sapiens
TNIQVTVTGPSSPSPVK

SEQ ID NO: 886 - protein, 12 aa, Homo sapiens
TQDEILFSNSTR

SEQ ID NO: 887 - protein, 13 aa, Homo sapiens
VGSPFELVVSGNK

SEQ ID NO: 888 - protein, 22 aa, Homo sapiens
VQITAIGDVLGPSINGLASLIR

SEQ ID NO: 889 - protein, 20 aa, Homo sapiens
YQPNIDVQESIHFLESEFSR

SEQ ID NO: 890 - protein, 19 aa, Homo sapiens
AFPALTSLDLSDNPGLGER

SEQ ID NO: 891 - protein, 43 aa, Homo sapiens
APQPDELPEVDNLTLDGNPFLVPGTALPHEGSMNSGVVPACAR

SEQ ID NO: 892 - protein, 22 aa, Homo sapiens
CMWSSALNSLNLSFAGLEQVPK

SEQ ID NO: 893 - protein, 38 aa, Homo sapiens
CVCNFSEPQPDWSEAFQCVSAVEVEIHAGGLNLEPFLK

SEQ ID NO: 894 - protein, 8 aa, Homo sapiens
ELTLEDLK

SEQ ID NO: 895 - protein, 10 aa, Homo sapiens
FPAIQNLALR

SEQ ID NO: 896 - protein, 10 aa, Homo sapiens
GLMAALCPHK

SEQ ID NO: 897 - protein, 21 aa, Homo sapiens
ITGTMPPLPLEATGLALSSLR

SEQ ID NO: 898 - protein, 10 aa, Homo sapiens
LKELTLEDLK

SEQ ID NO: 899 - protein, 10 aa, Homo sapiens
LRNVSWATGR

SEQ ID NO: 900 - protein, 18 aa, Homo sapiens
LTVGAAQVPAQLLVGALR

SEQ ID NO: 901 - protein, 8 aa, Homo sapiens
NVSWATGR

SEQ ID NO: 902 - protein, 19 aa, Homo sapiens
RLTVGAAQVPAQLLVGALR

SEQ ID NO: 903 - protein, 11 aa, Homo sapiens
SWLAELQQWLK

SEQ ID NO: 904 - protein, 15 aa, Homo sapiens
SWLAELQQWLKPGLK

SEQ ID NO: 905 - protein, 8 aa, Homo sapiens
VLDLSCNR

SEQ ID NO: 906 - protein, 18 aa, Homo sapiens
VLSIAQAHSPAFSCEQVR

SEQ ID NO: 907 - protein, 15 aa, Homo sapiens
AMSIPMWVDNVQCPK

SEQ ID NO: 908 - protein, 13 aa, Homo sapiens
APGWANSSAGSGR

SEQ ID NO: 909 - protein, 11 aa, Homo sapiens
CAGTVEVEIQR

SEQ ID NO: 910 - protein, 12 aa, Homo sapiens
CGVALSTPGGAR

SEQ ID NO: 911 - protein, 14 aa, Homo sapiens
CKGNESSLWDCPAR

SEQ ID NO: 912 - protein, 17 aa, Homo sapiens
EAEFGQGTGPIWLNEVK

SEQ ID NO: 913 - protein, 14 aa, Homo sapiens
EDAAVNCTDISVQK

SEQ ID NO: 914 - protein, 14 aa, Homo sapiens
EDAGVICSEFMSLR

SEQ ID NO: 915 - protein, 23 aa, Homo sapiens
FQGEWGTICDDGWDSYDAAVACK

SEQ ID NO: 916 - protein, 10 aa, Homo sapiens
GNESALWDCK

SEQ ID NO: 917 - protein, 12 aa, Homo sapiens
GNESSLWDCPAR

SEQ ID NO: 918 - protein, 15 aa, Homo sapiens
GPDTLWQCPSSPWEK

SEQ ID NO: 919 - protein, 23 aa, Homo sapiens
HGDTWGSICDSDFSLEAASVLCR

SEQ ID NO: 920 - protein, 16 aa, Homo sapiens
HKEDAGVICSEFMSLR

SEQ ID NO: 921 - protein, 23 aa, Homo sapiens
HSNCTHQQDAGVTCSDGSNLEMR

SEQ ID NO: 922 - protein, 22 aa, Homo sapiens
HYCNHNEDAGVTCSDGSDLELR

SEQ ID NO: 923 - protein, 24 aa, Homo sapiens
IQATNTWLFLSSCNGNETSLWDCK

SEQ ID NO: 924 - protein, 19 aa, Homo sapiens
IWMDHVSCRGNESALWDCK

SEQ ID NO: 925 - protein, 15 aa, Homo sapiens
LASPSEETWITCDNK

SEQ ID NO: 926 - protein, 14 aa, Homo sapiens
LEVFYNGAWGTVGK

SEQ ID NO: 927 - protein, 11 aa, Homo sapiens
LVDGVTECSGR

SEQ ID NO: 928 - protein, 11 aa, Homo sapiens
LVGGDIPCSGR

SEQ ID NO: 929 - protein, 16 aa, Homo sapiens
NWQWGGLTCDHYEEAK

SEQ ID NO: 930 - protein, 29 aa, Homo sapiens
QLGCGEAINATGSAHFGEGTGPIWLDEMK

SEQ ID NO: 931 - protein, 13 aa, Homo sapiens
QLGCPTAVTAIGR

SEQ ID NO: 932 - protein, 13 aa, Homo sapiens
SSMSETTVGVVCR

SEQ ID NO: 933 - protein, 26 aa, Homo sapiens
TLGAWGSLCNSHWDIEDAHVLCQQLK

SEQ ID NO: 934 - protein, 36 aa, Homo sapiens
VEIWHGGSWGTVCDDSWDLDDAQVVCQQLGCGPALK

SEQ ID NO: 935 - protein, 27 aa, Homo sapiens
VEIYHEGSWGTICDDSWDLSDAHVVCR

SEQ ID NO: 936 - protein, 32 aa, Homo sapiens
VQEEWGTVCNNGWSMEAVSVICNQLGCPTAIK

SEQ ID NO: 937 - protein, 23 aa, Homo sapiens
WGHSECGHKEDAAVNCTDISVQK

SEQ ID NO: 938 - protein, 19 aa, Homo sapiens
WGTVCDDNFNIDHASVICR

SEQ ID NO: 939 - protein, 20 aa, Homo sapiens
GATHCYDGYIHLSGGGLSTK

SEQ ID NO: 940 - protein, 19 aa, Homo sapiens
MSIQGCVAQPSSFLLNHTR

SEQ ID NO: 941 - protein, 27 aa, Homo sapiens
QEDFCNNLVNSLPLWAPQPPADPGSLR

SEQ ID NO: 942 - protein, 20 aa, Homo sapiens
DSVICLKGSQWSDIEEFCNR

SEQ ID NO: 943 - protein, 19 aa, Homo sapiens
EIYCPAPPQIDNGIIQGER

SEQ ID NO: 944 - protein, 29 aa, Homo sapiens
GFTMIGEHSIYCTVNNDEGEWSGPPPECR

SEQ ID NO: 945 - protein, 13 aa, Homo sapiens
GSQWSDIEEFCNR

SEQ ID NO: 946 - protein, 8 aa, Homo sapiens
LTCLQNLK

SEQ ID NO: 947 - protein, 20 aa, Homo sapiens
QPYITQNYFPVGTVVEYECR

SEQ ID NO: 948 - protein, 24 aa, Homo sapiens
TPSAAQNPMMTNASATQATLTAQK

SEQ ID NO: 949 - protein, 10 aa, Homo sapiens
ENELTYYCCK

SEQ ID NO: 950 - protein, 12 aa, Homo sapiens
LRENELTYYCCK

SEQ ID NO: 951 - protein, 16 aa, Homo sapiens
TAVNCSSDFDACLITK

SEQ ID NO: 952 - protein, 17 aa, Homo sapiens
CQEEVSHIPAVHPGSFR

SEQ ID NO: 953 - protein, 16 aa, Homo sapiens
ESLELEDPSSGLGVTK

SEQ ID NO: 954 - protein, 22 aa, Homo sapiens
GHHNCSESLELEDPSSGLGVTK

SEQ ID NO: 955 - protein, 25 aa, Homo sapiens
MATPLLMQALPMGALPQGPMQNATK

SEQ ID NO: 956 - protein, 20 aa, Homo sapiens
YGNMTEDHVMHLLQNADPLK

SEQ ID NO: 957 - protein, 26 aa, Homo sapiens
AQVIINITDVDEPPIFQQPFYHFQLK

SEQ ID NO: 958 - protein, 15 aa, Homo sapiens
DTGENLETPSSFTIK

SEQ ID NO: 959 - protein, 13 aa, Homo sapiens
DWIWNQMHIDEEK

SEQ ID NO: 960 - protein, 23 aa, Homo sapiens
DWIWNQMHIDEEKNTSLPHHVGK

SEQ ID NO: 961 - protein, 17 aa, Homo sapiens
ELDREVYPWYNLTVEAK

SEQ ID NO: 962 - protein, 38 aa, Homo sapiens
ELDSTGTPTGKESIVQVHIEVLDENDNAPEFAKPYQPK

SEQ ID NO: 963 - protein, 15 aa, Homo sapiens
ENISEYHLTAVIVDK

SEQ ID NO: 964 - protein, 22 aa, Homo sapiens
ESIVQVHIEVLDENDNAPEFAK

SEQ ID NO: 965 - protein, 27 aa, Homo sapiens
ESIVQVHIEVLDENDNAPEFAKPYQPK

SEQ ID NO: 966 - protein, 13 aa, Homo sapiens
EVYPWYNLTVEAK

SEQ ID NO: 967 - protein, 24 aa, Homo sapiens
FILNTENNFTLTDNHDNTANITVK

SEQ ID NO: 968 - protein, 48 aa, Homo sapiens
GDYQDAFTIETNPAHNEGIIKPMKPLDYEYIQQYSFIVEATDPTIDLR

SEQ ID NO: 969 - protein, 16 aa, Homo sapiens
KPLIGTVLAMDPDAAR

SEQ ID NO: 970 - protein, 18 aa, Homo sapiens
LDRENISEYHLTAVIVDK

SEQ ID NO: 971 - protein, 33 aa, Homo sapiens
LDRENISEYHLTAVIVDKDTGENLETPSSFTIK

SEQ ID NO: 972 - protein, 35 aa, Homo sapiens
SVPEIHEQLVTYDEEGGGEMDTTSYDVSVLNSVRR

SEQ ID NO: 973 - protein, 19 aa, Homo sapiens
VGTSVGSLFVEDPDEPQNR

SEQ ID NO: 974 - protein, 14 aa, Homo sapiens
VHDVNDNWPVFTHR

SEQ ID NO: 975 - protein, 16 aa, Homo sapiens
VHFLPVVISDNGMPSR

SEQ ID NO: 976 - protein, 8 aa, Homo sapiens
YEIVVEAR

SEQ ID NO: 977 - protein, 10 aa, Homo sapiens
YTFVVPEDTR

SEQ ID NO: 978 - protein, 38 aa, Homo sapiens
DIFEVEENTNVTEPLVDIHVPEGQEVTLGALSTPFAFR

SEQ ID NO: 979 - protein, 20 aa, Homo sapiens
GNVNGTFIIHPDSGNLTVAR

SEQ ID NO: 980 - protein, 18 aa, Homo sapiens
IQAQDPEFSDLNSAITYR

SEQ ID NO: 981 - protein, 17 aa, Homo sapiens
IQGNQLFLNVTPDYEEK

SEQ ID NO: 982 - protein, 20 aa, Homo sapiens
LDRPLDFYERPNMTFWLLVR

SEQ ID NO: 983 - protein, 20 aa, Homo sapiens
SLLEAQLLCQSGGTLVTQLR

SEQ ID NO: 984 - protein, 22 aa, Homo sapiens
VEEDTKVNSTVIPETQLQAEDR

SEQ ID NO: 985 - protein, 18 aa, Homo sapiens
VFVSVLDVNDNAPEFPFK

SEQ ID NO: 986 - protein, 16 aa, Homo sapiens
VNSTVIPETQLQAEDR

SEQ ID NO: 987 - protein, 30 aa, Homo sapiens
DAVAFTCEPETQDTTYLWWINNQSLPVSPR

SEQ ID NO: 988 - protein, 17 aa, Homo sapiens
DSVNLTCSTNDTGISIR

SEQ ID NO: 989 - protein, 16 aa, Homo sapiens
EDAGTYWCEVFNPISK

SEQ ID NO: 990 - protein, 28 aa, Homo sapiens
ETIYPNASLLIQNVTQNDTGFYTLQVIK

SEQ ID NO: 991 - protein, 20 aa, Homo sapiens
EVLLLVHNLPQQLFGYSWYK

SEQ ID NO: 992 - protein, 14 aa, Homo sapiens
LSQGNTTLSINPVK

SEQ ID NO: 993 - protein, 18 aa, Homo sapiens
NDTGPYECEIQNPVSANR

SEQ ID NO: 994 - protein, 25 aa, Homo sapiens
NQSLPSSERMKLSQGNTTLSINPVK

SEQ ID NO: 995 - protein, 21 aa, Homo sapiens
QIVGYAIGTQQATPGPANSGR

SEQ ID NO: 996 - protein, 34 aa, Homo sapiens
SDLVNEEATGQFHVYPELPKPSISSNNSNPVEDK

SEQ ID NO: 997 - protein, 25 aa, Homo sapiens
SDPVTLNVTYGPDTPTISPSDTYYR

SEQ ID NO: 998 - protein, 24 aa, Homo sapiens
TTVTGDKDSVNLTCSTNDTGISIR

SEQ ID NO: 999 - protein, 9 aa, Homo sapiens
TLTLLSVTR

SEQ ID NO: 1000 - protein, 32 aa, Homo sapiens
AASILSDGDIGVDISLTGDPVITASYLESHHK

SEQ ID NO: 1001 - protein, 9 aa, Homo sapiens
AMMLLGQVK

SEQ ID NO: 1002 - protein, 10 aa, Homo sapiens
ASYPDITGEK

SEQ ID NO: 1003 - protein, 25 aa, Homo sapiens
DGFLLLQMDFGFPEHLLVDFLQSLS

SEQ ID NO: 1004 - protein, 16 aa, Homo sapiens
EINVISNIMADFVQTR

SEQ ID NO: 1005 - protein, 30 aa, Homo sapiens
FLFPRPDQQHSVAYTFEEDIVTTVQASYSK

SEQ ID NO: 1006 - protein, 26 aa, Homo sapiens
GHFIYKNVSEDLPLPTFSPTLLGDSR

SEQ ID NO: 1007 - protein, 15 aa, Homo sapiens
GVSLFDIINPEIITR

SEQ ID NO: 1008 - protein, 11 aa, Homo sapiens
GVVVNSSVMVK

SEQ ID NO: 1009 - protein, 15 aa, Homo sapiens
ITKPALLVLNHETAK

SEQ ID NO: 1010 - protein, 12 aa, Homo sapiens
LEVVFTALMNSK

SEQ ID NO: 1011 - protein, 13 aa, Homo sapiens
LFLSLLDFQITPK

SEQ ID NO: 1012 - protein, 11 aa, Homo sapiens
LMLSLMGDEFK

SEQ ID NO: 1013 - protein, 20 aa, Homo sapiens
MLAATVLTLALLGNAHACSK

SEQ ID NO: 1014 - protein, 9 aa, Homo sapiens
MLYFWFSER

SEQ ID NO: 1015 - protein, 20 aa, Homo sapiens
NVSEDLPLPTFSPTLLGDSR

SEQ ID NO: 1016 - protein, 12 aa, Homo sapiens
QLFTNFISFTLK

SEQ ID NO: 1017 - protein, 14 aa, Homo sapiens
SIDVSIQNVSVVFK

SEQ ID NO: 1018 - protein, 12 aa, Homo sapiens
TDAPDCYLSFHK

SEQ ID NO: 1019 - protein, 32 aa, Homo sapiens
TVSNLTESSSESVQSFLQSMITAVGIPEVMSR

SEQ ID NO: 1020 - protein, 24 aa, Homo sapiens
YGLHNIQISHLSIASSQVELVEAK

SEQ ID NO: 1021 - protein, 9 aa, Homo sapiens
AMISSPPFR

SEQ ID NO: 1022 - protein, 14 aa, Homo sapiens
CLDPCVVSEENMNK

SEQ ID NO: 1023 - protein, 36 aa, Homo sapiens
CVESTAYCGPPPSINNGDTTSFPLSVYPPGSTVTYR

SEQ ID NO: 1024 - protein, 23 aa, Homo sapiens
EEYGHNEVVEYDCNPNFIINGPK

SEQ ID NO: 1025 - protein, 9 aa, Homo sapiens
ENYLLPEAK

SEQ ID NO: 1026 - protein, 27 aa, Homo sapiens
EQFCPPPPQIPNAQNMTTTVNYQDGEK

SEQ ID NO: 1027 - protein, 7 aa, Homo sapiens
FEYPICE

SEQ ID NO: 1028 - protein, 17 aa, Homo sapiens
GECHVPILEANVDAQPK

SEQ ID NO: 1029 - protein, 12 aa, Homo sapiens
GWSTPPICSFTK

SEQ ID NO: 1030 - protein, 37 aa, Homo sapiens
IHHGFLYDEEDYNPFSQVPTGEVFYYSCEYNFVSPSK

SEQ ID NO: 1031 - protein, 19 aa, Homo sapiens
IQCVDGEWTTLPTCVEQVK

SEQ ID NO: 1032 - protein, 13 aa, Homo sapiens
ITCTEEGWSPTPK

SEQ ID NO: 1033 - protein, 24 aa, Homo sapiens
KEEYGHNEVVEYDCNPNFIINGPK

SEQ ID NO: 1034 - protein, 20 aa, Homo sapiens
KIQCVDGEWTTLPTCVEQVK

SEQ ID NO: 1035 - protein, 10 aa, Homo sapiens
LQGSVTVTCR

SEQ ID NO: 1036 - protein, 8 aa, Homo sapiens
MCSFPFVK

SEQ ID NO: 1037 - protein, 31 aa, Homo sapiens
NEYAMIGNNMITCINGIWTELPMCVATHQLK

SEQ ID NO: 1038 - protein, 32 aa, Homo sapiens
NGHSESSGLIHLEGDTVQIICNTGYSLQNNEK

SEQ ID NO: 1039 - protein, 39 aa, Homo sapiens
NGHSESSGLIHLEGDTVQIICNTGYSLQNNEKNISCVER

SEQ ID NO: 1040 - protein, 28 aa, Homo sapiens
REQFCPPPPQIPNAQNMTTTVNYQDGEK

SEQ ID NO: 1041 - protein, 14 aa, Homo sapiens
SCGPPPQLSNGEVK

SEQ ID NO: 1042 - protein, 31 aa, Homo sapiens
TCGYIPELEYGYVQPSVPPYQHGVSVEVNCR

SEQ ID NO: 1043 - protein, 10 aa, Homo sapiens
TGDAVEFQCK

SEQ ID NO: 1044 - protein, 21 aa, Homo sapiens
VGSDSVQCYQFGWSPNFPTCK

SEQ ID NO: 1045 - protein, 10 aa, Homo sapiens
WNPEVDCTEK

SEQ ID NO: 1046 - protein, 23 aa, Homo sapiens
CSAPEPSQKPPGKPCPGLAYEQR

SEQ ID NO: 1047 - protein, 22 aa, Homo sapiens
GLLGGGVSVEDCCLNTAFAYQK

SEQ ID NO: 1048 - protein, 9 aa, Homo sapiens
ITEGAQAPR

SEQ ID NO: 1049 - protein, 8 aa, Homo sapiens
LCTPLLPK

SEQ ID NO: 1050 - protein, 7 aa, Homo sapiens
NVTFWGR

SEQ ID NO: 1051 - protein, 11 aa, Homo sapiens
NVTFWGRPLPR

SEQ ID NO: 1052 - protein, 10 aa, Homo sapiens
PCPGLAYEQR

SEQ ID NO: 1053 - protein, 13 aa, Homo sapiens
SISCQEIPGQQSR

SEQ ID NO: 1054 - protein, 14 aa, Homo sapiens
YPPTVSMVEGQGEK

SEQ ID NO: 1055 - protein, 21 aa, Homo sapiens
YPPTVSMVEGQGEKNVTFWGR

SEQ ID NO: 1056 - protein, 25 aa, Homo sapiens
YPPTVSMVEGQGEKNVTFWGRPLPR

SEQ ID NO: 1057 - protein, 15 aa, Homo sapiens
EAGTLAYYEICDFLR

SEQ ID NO: 1058 - protein, 13 aa, Homo sapiens
EGDGSCFPDALDR

SEQ ID NO: 1059 - protein, 36 aa, Homo sapiens
FLCTHIIYSFANISNDHIDTWEWNDVTLYGMLNTLK

SEQ ID NO: 1060 - protein, 8 aa, Homo sapiens
FPLTNAIK

SEQ ID NO: 1061 - protein, 13 aa, Homo sapiens
FSNTDYAVGYMLR

SEQ ID NO: 1062 - protein, 14 aa, Homo sapiens
GNQWVGYDDQESVK

SEQ ID NO: 1063 - protein, 11 aa, Homo sapiens
ILGQQVPYATK

SEQ ID NO: 1064 - protein, 20 aa, Homo sapiens
ISQHLDFISIMTYDFHGAWR

SEQ ID NO: 1065 - protein, 12 aa, Homo sapiens
LVCYYTSWSQYR

SEQ ID NO: 1066 - protein, 10 aa, Homo sapiens
LVMGIPTFGR

SEQ ID NO: 1067 - protein, 25 aa, Homo sapiens
QLAGAMVWALDLDDFQGSFCGQDLR

SEQ ID NO: 1068 - protein, 12 aa, Homo sapiens
QLLLSAALSAGK

SEQ ID NO: 1069 - protein, 23 aa, Homo sapiens
SFTLASSETGVGAPISGPGIPGR

SEQ ID NO: 1070 - protein, 7 aa, Homo sapiens
SVPPFLR

SEQ ID NO: 1071 - protein, 16 aa, Homo sapiens
THGFDGLDLAWLYPGR

SEQ ID NO: 1072 - protein, 14 aa, Homo sapiens
TLLSVGGWNFGSQR

SEQ ID NO: 1073 - protein, 11 aa, Homo sapiens
VTIDSSYDIAK

SEQ ID NO: 1074 - protein, 9 aa, Homo sapiens
CFLAFTQTK

SEQ ID NO: 1075 - protein, 12 aa, Homo sapiens
DQLPYICQFGIV

SEQ ID NO: 1076 - protein, 11 aa, Homo sapiens
EQQALQTVCLK

SEQ ID NO: 1077 - protein, 21 aa, Homo sapiens
GGTLGTPQTGSENDALYEYLR

SEQ ID NO: 1078 - protein, 12 aa, Homo sapiens
LDTLAQEVALLK

SEQ ID NO: 1079 - protein, 6 aa, Homo sapiens
MFEELK

SEQ ID NO: 1080 - protein, 14 aa, Homo sapiens
NWETEITAQPDGGK

SEQ ID NO: 1081 - protein, 29 aa, Homo sapiens
QSVGNEAEIWLGLNDMAAEGTWVDMTGAR

SEQ ID NO: 1082 - protein, 14 aa, Homo sapiens
SRLDTLAQEVALLK

SEQ ID NO: 1083 - protein, 14 aa, Homo sapiens
TENCAVLSGAANGK

SEQ ID NO: 1084 - protein, 12 aa, Homo sapiens
TFHEASEDCISR

SEQ ID NO: 1085 - protein, 12 aa, Homo sapiens
ASSIIDELFQDR

SEQ ID NO: 1086 - protein, 16 aa, Homo sapiens
ASSIIDELFQDRFFTR

SEQ ID NO: 1087 - protein, 8 aa, Homo sapiens
EDALNETR

SEQ ID NO: 1088 - protein, 16 aa, Homo sapiens
EILSVDCSTNNPSQAK

SEQ ID NO: 1089 - protein, 10 aa, Homo sapiens
EIQNAVNGVK

SEQ ID NO: 1090 - protein, 11 aa, Homo sapiens
ELDESLQVAER

SEQ ID NO: 1091 - protein, 18 aa, Homo sapiens
ELPGVCNETMMALWEECK

SEQ ID NO: 1092 - protein, 22 aa, Homo sapiens
ELPGVCNETMMALWEECKPCLK

SEQ ID NO: 1093 - protein, 16 aa, Homo sapiens
EPQDTYHYLPFSLPHR

SEQ ID NO: 1094 - protein, 20 aa, Homo sapiens
FFTREPQDTYHYLPFSLPHR

SEQ ID NO: 1095 - protein, 8 aa, Homo sapiens
FMETVAEK

SEQ ID NO: 1096 - protein, 8 aa, Homo sapiens
HNSTGCLR

SEQ ID NO: 1097 - protein, 9 aa, Homo sapiens
IDSLLENDR

SEQ ID NO: 1098 - protein, 11 aa, Homo sapiens
KTLLSNLEEAK

SEQ ID NO: 1099 - protein, 12 aa, Homo sapiens
KTLLSNLEEAKK

SEQ ID NO: 1100 - protein, 14 aa, Homo sapiens
LANLTQGEDQYYLR

SEQ ID NO: 1101 - protein, 37 aa, Homo sapiens
LANLTQGEDQYYLRVTTVASHTSDSDVPSGVTEVVVK

SEQ ID NO: 1102 - protein, 17 aa, Homo sapiens
LFDSDPITVTVPVEVSR

SEQ ID NO: 1103 - protein, 24 aa, Homo sapiens
LKELPGVCNETMMALWEECKPCLK

SEQ ID NO: 1104 - protein, 20 aa, Homo sapiens
MLNTSSLLEQLNEQFNWVSR

SEQ ID NO: 1105 - protein, 20 aa, Homo sapiens
QLEEFLNQSSPFYFWMNGDR

SEQ ID NO: 1106 - protein, 29 aa, Homo sapiens
QLEEFLNQSSPFYFWMNGDRIDSLLENDR

SEQ ID NO: 1107 - protein, 44 aa, Homo sapiens
QLEEFLNQSSPFYFWMNGDRIDSLLENDRQQTHMLDVMQDHFSR

SEQ ID NO: 1108 - protein, 15 aa, Homo sapiens
QQTHMLDVMQDHFSR

SEQ ID NO: 1109 - protein, 12 aa, Homo sapiens
RELDESLQVAER

SEQ ID NO: 1110 - protein, 25 aa, Homo sapiens
SYQWKMLNTSSLLEQLNEQFNWVSR

SEQ ID NO: 1111 - protein, 10 aa, Homo sapiens
TLLSNLEEAK

SEQ ID NO: 1112 - protein, 11 aa, Homo sapiens
TLLSNLEEAKK

SEQ ID NO: 1113 - protein, 23 aa, Homo sapiens
VTTVASHTSDSDVPSGVTEVVVK

SEQ ID NO: 1114 - protein, 40 aa, Homo sapiens
VTTVASHTSDSDVPSGVTEVVVKLFDSDPITVTVPVEVSR

SEQ ID NO: 1115 - protein, 6 aa, Homo sapiens
YNELLK

SEQ ID NO: 1116 - protein, 10 aa, Homo sapiens
AIHLDLEEYR

SEQ ID NO: 1117 - protein, 14 aa, Homo sapiens
AIHLDLEEYRNSSR

SEQ ID NO: 1118 - protein, 11 aa, Homo sapiens
ALEQDLPVNIK

SEQ ID NO: 1119 - protein, 55 aa, Homo sapiens
DQDFHSGTFGGILHEPMADLVALLGSLVDSSGHILVPGIYDEVVPLTEEEINTYK

SEQ ID NO: 1120 - protein, 9 aa, Homo sapiens
EEILMHLWR

SEQ ID NO: 1121 - protein, 15 aa, Homo sapiens
EWVAIESDSVQPVPR

SEQ ID NO: 1122 - protein, 19 aa, Homo sapiens
FFSGVDYIVISDNLWISQR

SEQ ID NO: 1123 - protein, 20 aa, Homo sapiens
FIIEGMEEAGSVALEELVEK

SEQ ID NO: 1124 - protein, 6 aa, Homo sapiens
FLFDTK

SEQ ID NO: 1125 - protein, 17 aa, Homo sapiens
GDGWLTDPYVLTEVDGK

SEQ ID NO: 1126 - protein, 10 aa, Homo sapiens
GNSYFMVEVK

SEQ ID NO: 1127 - protein, 14 aa, Homo sapiens
GPVLAWINAVSAFR

SEQ ID NO: 1128 - protein, 16 aa, Homo sapiens
GTVCFYGHLDVQPADR

SEQ ID NO: 1129 - protein, 8 aa, Homo sapiens
HLEDVFSK

SEQ ID NO: 1130 - protein, 13 aa, Homo sapiens
LFAAFFLEMAQLH

SEQ ID NO: 1131 - protein, 12 aa, Homo sapiens
LVPHMNVSAVEK

SEQ ID NO: 1132 - protein, 11 aa, Homo sapiens
MMAVAADTLQR

SEQ ID NO: 1133 - protein, 25 aa, Homo sapiens
MVVSMTLGLHPWIANIDDTQYLAAK

SEQ ID NO: 1134 - protein, 20 aa, Homo sapiens
SVVLIPLGAVDDGEHSQNEK

SEQ ID NO: 1135 - protein, 11 aa, Homo sapiens
TVFGTEPDMIR

SEQ ID NO: 1136 - protein, 17 aa, Homo sapiens
VFQYIDLHQDEFVQTLK

SEQ ID NO: 1137 - protein, 8 aa, Homo sapiens
WNYIEGTK

SEQ ID NO: 1138 - protein, 19 aa, Homo sapiens
YPSLSIHGIEGAFDEPGTK

SEQ ID NO: 1139 - protein, 14 aa, Homo sapiens
ANSTGTLVITDPTR

SEQ ID NO: 1140 - protein, 13 aa, Homo sapiens
AVDLIPWMEYEFR

SEQ ID NO: 1141 - protein, 25 aa, Homo sapiens
DVYALMGQNVTLECFALGNPVPDIR

SEQ ID NO: 1142 - protein, 10 aa, Homo sapiens
FIPLIPIPER

SEQ ID NO: 1143 - protein, 33 aa, Homo sapiens
FVSQTNGNLYIANVEASDKGNYSCFVSSPSITK

SEQ ID NO: 1144 - protein, 21 aa, Homo sapiens
GGEKNMVDSFLPVCASLPPTW

SEQ ID NO: 1145 - protein, 19 aa, Homo sapiens
GMVLLCDPPYHFPDDLSYR

SEQ ID NO: 1146 - protein, 14 aa, Homo sapiens
GNYSCFVSSPSITK

SEQ ID NO: 1147 - protein, 10 aa, Homo sapiens
GTEWLVNSSR

SEQ ID NO: 1148 - protein, 16 aa, Homo sapiens
ILIWEDGSLEINNITR

SEQ ID NO: 1149 - protein, 33 aa, Homo sapiens
IYVQAFPEWVEHINDTEVDIGSDLYWPCVATGK

SEQ ID NO: 1150 - protein, 23 aa, Homo sapiens
STEATLSFGYLDPFPPEERPEVR

SEQ ID NO: 1151 - protein, 14 aa, Homo sapiens
TTKPYPADIVVQFK

SEQ ID NO: 1152 - protein, 19 aa, Homo sapiens
VLEPMPSTAEISTSGAVLK

SEQ ID NO: 1153 - protein, 14 aa, Homo sapiens
WLLNEFPVFITMDK

SEQ ID NO: 1154 - protein, 21 aa, Homo sapiens
YTCTAQTIVDNSSASADLVVR

SEQ ID NO: 1155 - protein, 33 aa, Homo sapiens
AEATTTTTSAGAEAAEGQFDRYYHEEELESALR

SEQ ID NO: 1156 - protein, 26 aa, Homo sapiens
DSITGSGLENATISVAGINHNITTGR

SEQ ID NO: 1157 - protein, 10 aa, Homo sapiens
FANEYPNITR

SEQ ID NO: 1158 - protein, 20 aa, Homo sapiens
GILNATISVAEINHPVTTYK

SEQ ID NO: 1159 - protein, 22 aa, Homo sapiens
GLVMNYPHITNLTNLGQSTEYR

SEQ ID NO: 1160 - protein, 46 aa, Homo sapiens
NMYPNEYFPHGITNGASWYNVPGGMQDWNYLQTNCFEVTIELGCVK

SEQ ID NO: 1161 - protein, 12 aa, Homo sapiens
YYHEEELESALR

SEQ ID NO: 1162 - protein, 10 aa, Homo sapiens
AFGSNPNLTK

SEQ ID NO: 1163 - protein, 12 aa, Homo sapiens
AGGSWDLAVQER

SEQ ID NO: 1164 - protein, 14 aa, Homo sapiens
DHLGFQVTWPDESK

SEQ ID NO: 1165 - protein, 7 aa, Homo sapiens
DLEELVK

SEQ ID NO: 1166 - protein, 10 aa, Homo sapiens
GQVVPALNEK

SEQ ID NO: 1167 - protein, 27 aa, Homo sapiens
LEDLEVTGSSFLNLSTNIFSNLTSLGK

SEQ ID NO: 1168 - protein, 8 aa, Homo sapiens
LELLSLSK

SEQ ID NO: 1169 - protein, 9 aa, Homo sapiens
LFQPLTHLK

SEQ ID NO: 1170 - protein, 30 aa, Homo sapiens
LGSLQELFLDSNNISELPPQVFSQLFCLER

SEQ ID NO: 1171 - protein, 15 aa, Homo sapiens
LLNIQTYCAGPAYLK

SEQ ID NO: 1172 - protein, 16 aa, Homo sapiens
LSNNALSGLPQGVFGK

SEQ ID NO: 1173 - protein, 37 aa, Homo sapiens
LTLNFNMLEALPEGLFQHLAALESLHLQGNQLQALPR

SEQ ID NO: 1174 - protein, 8 aa, Homo sapiens
LTVSIEAR

SEQ ID NO: 1175 - protein, 21 aa, Homo sapiens
LYLGSNNLTALHPALFQNLSK

SEQ ID NO: 1176 - protein, 29 aa, Homo sapiens
LYLGSNNLTALHPALFQNLSKLELLSLSK

SEQ ID NO: 1177 - protein, 28 aa, Homo sapiens
NAITHLPLSIFASLGNLTFLSLQWNMLR

SEQ ID NO: 1178 - protein, 15 aa, Homo sapiens
NIIFVETSFTTLETR

SEQ ID NO: 1179 - protein, 46 aa, Homo sapiens
NQLTTLPEGIFDTNYNLFNLALHGNPWQCDCHLAYLFNWLQQYTDR

SEQ ID NO: 1180 - protein, 9 aa, Homo sapiens
PDAFGGLPR

SEQ ID NO: 1181 - protein, 8 aa, Homo sapiens
QLVCPVTR

SEQ ID NO: 1182 - protein, 18 aa, Homo sapiens
SLMLSYNAITHLPAGIFR

SEQ ID NO: 1183 - protein, 25 aa, Homo sapiens
SLMLSYNAITHLPAGIFRDLEELVK

SEQ ID NO: 1184 - protein, 22 aa, Homo sapiens
SQCTYSNPEGTVVLACDQAQCR

SEQ ID NO: 1185 - protein, 27 aa, Homo sapiens
TLNLAQNLLAQLPEELFHPLTSLQTLK

SEQ ID NO: 1186 - protein, 38 aa, Homo sapiens
VLPAGLFAHTPCLVGLSLTHNQLETVAEGTFAHLSNLR

SEQ ID NO: 1187 - protein, 12 aa, Homo sapiens
VVFLNTQLCQFR

SEQ ID NO: 1188 - protein, 21 aa, Homo sapiens
VVFLNTQLCQFRPDAFGGLPR

SEQ ID NO: 1189 - protein, 26 aa, Homo sapiens
WLNVQLSPQQGSLGLQYNASQEWDLR

SEQ ID NO: 1190 - protein, 17 aa, Homo sapiens
CELSTSAVQCPHPQILR

SEQ ID NO: 1191 - protein, 13 aa, Homo sapiens
EAPYFYNDTVTFK

SEQ ID NO: 1192 - protein, 15 aa, Homo sapiens
EVNCSSPADMDGIQK

SEQ ID NO: 1193 - protein, 29 aa, Homo sapiens
HTGMMAENFLYGNEVSYECDQGFYLLGEK

SEQ ID NO: 1194 - protein, 15 aa, Homo sapiens
ISYYSTPIAVGTVIR

SEQ ID NO: 1195 - protein, 19 aa, Homo sapiens
MPVCEEIFCPSPPPILNGR

SEQ ID NO: 1196 - protein, 19 aa, Homo sapiens
PQHQFVRPDVNSSCGEGYK

SEQ ID NO: 1197 - protein, 25 aa, Homo sapiens
THSAYSHNDIVYVDCNPGFIMNGSR

SEQ ID NO: 1198 - protein, 13 aa, Homo sapiens
TPNGNHTGGNIAR

SEQ ID NO: 1199 - protein, 14 aa, Homo sapiens
YSSCPEPIVPGGYK

SEQ ID NO: 1200 - protein, 45 aa, Homo sapiens
DIGYSFTVGGSEILFEVPEVTVAPVHICTSWESASGIVEFWVDGK

SEQ ID NO: 1201 - protein, 10 aa, Homo sapiens
ESDTSYVSLK

SEQ ID NO: 1202 - protein, 10 aa, Homo sapiens
GYSIFSYATK

SEQ ID NO: 1203 - protein, 11 aa, Homo sapiens
GYSIFSYATKR

SEQ ID NO: 1204 - protein, 11 aa, Homo sapiens
QDNEILIFWSK

SEQ ID NO: 1205 - protein, 12 aa, Homo sapiens
RQDNEILIFWSK

SEQ ID NO: 1206 - protein, 10 aa, Homo sapiens
YEVQGEVFTK

SEQ ID NO: 1207 - protein, 15 aa, Homo sapiens
YEVQGEVFTKPQLWP

SEQ ID NO: 1208 - protein, 14 aa, Homo sapiens
DEASSVEVTWPDGK

SEQ ID NO: 1209 - protein, 21 aa, Homo sapiens
EHGDPLIEELNPGDALEPEGR

SEQ ID NO: 1210 - protein, 22 aa, Homo sapiens
GDGTFVDAAASAGVDDPHQHGR

SEQ ID NO: 1211 - protein, 11 aa, Homo sapiens
GNQGFNNNWLR

SEQ ID NO: 1212 - protein, 33 aa, Homo sapiens
GTGGVVTDFDGDGMLDLILSHGESMAQPLSVFR

SEQ ID NO: 1213 - protein, 30 aa, Homo sapiens
GVSVGPILSSSASDIFCDNENGPNFLFHNR

SEQ ID NO: 1214 - protein, 22 aa, Homo sapiens
IIDGGSGYLCEMEPVAHFGLGK

SEQ ID NO: 1215 - protein, 9 aa, Homo sapiens
LVNIAVDER

SEQ ID NO: 1216 - protein, 17 aa, Homo sapiens
NVASGEMNSVLEILYPR

SEQ ID NO: 1217 - protein, 17 aa, Homo sapiens
QGNAIGVTACDIDGDGR

SEQ ID NO: 1218 - protein, 23 aa, Homo sapiens
TVITADFDNDQELEIFFNNIAYR

SEQ ID NO: 1219 - protein, 13 aa, Homo sapiens
VDIVYGNWNGPHR

SEQ ID NO: 1220 - protein, 13 aa, Homo sapiens
WEDILSDEVNVAR

SEQ ID NO: 1221 - protein, 30 aa, Homo sapiens
YSIYIANYAYGNVGPDALIEMDPEASDLSR

SEQ ID NO: 1222 - protein, 20 aa, Homo sapiens
AFCSFQIYAVPWQGTMTLSK

SEQ ID NO: 1223 - protein, 11 aa, Homo sapiens
ALDFAVGEYNK

SEQ ID NO: 1224 - protein, 17 aa, Homo sapiens
LVGGPMDASVEEEGVRR

SEQ ID NO: 1225 - protein, 16 aa, Homo sapiens
QIVAGVNYFLDVELGR

SEQ ID NO: 1226 - protein, 17 aa, Homo sapiens
TQPNLDNCPFHDQPHLK

SEQ ID NO: 1227 - protein, 8 aa, Homo sapiens
DIIDPAFR

SEQ ID NO: 1228 - protein, 20 aa, Homo sapiens
DPAGHFHQVWYDNPQSISLK

SEQ ID NO: 1229 - protein, 20 aa, Homo sapiens
EIEGSQVTFDVAWSPKNIDR

SEQ ID NO: 1230 - protein, 19 aa, Homo sapiens
GIGMWNANCLDYSGDAVAK

SEQ ID NO: 1231 - protein, 15 aa, Homo sapiens
HHPDFEVFVFDVGQK

SEQ ID NO: 1232 - protein, 27 aa, Homo sapiens
LVMGVPWYGYDYTCLNLSEDHVCTIAK

SEQ ID NO: 1233 - protein, 13 aa, Homo sapiens
QINSSISGNLWDK

SEQ ID NO: 1234 - protein, 16 aa, Homo sapiens
QINSSISGNLWDKDQR

SEQ ID NO: 1235 - protein, 15 aa, Homo sapiens
SYDWSQITTVATFGK

SEQ ID NO: 1236 - protein, 30 aa, Homo sapiens
TQYMDGINIDIEQEVNCLSPEYDALTALVK

SEQ ID NO: 1237 - protein, 11 aa, Homo sapiens
ILHLPTSWDWR

SEQ ID NO: 1238 - protein, 37 aa, Homo sapiens
ILTNNSQTPILSPQEVVSCSQYAQGCEGGFPYLIAGK

SEQ ID NO: 1239 - protein, 20 aa, Homo sapiens
SWTATTYMEYETLTLGDMIR

SEQ ID NO: 1240 - protein, 19 aa, Homo sapiens
VTTYCNETMTGWVHDVLGR

SEQ ID NO: 1241 - protein, 23 aa, Homo sapiens
YAQDFGLVEEACFPYTGTDSPCK

SEQ ID NO: 1242 - protein, 22 aa, Homo sapiens
YYSSEYHYVGGFYGGCNEALMK

SEQ ID NO: 1243 - protein, 8 aa, Homo sapiens
NFVITYNR

SEQ ID NO: 1244 - protein, 26 aa, Homo sapiens
NLGGLETEDDYSYQGHMQSCNFSAEK

SEQ ID NO: 1245 - protein, 23 aa, Homo sapiens
PLRPLCSPWLIDHAVLLVGYGNR

SEQ ID NO: 1246 - protein, 44 aa, Homo sapiens
SAFTQGSAMISSLSQNHPDNRNETFSSVISLLNEDPLSQDLPVK

SEQ ID NO: 1247 - protein, 15 aa, Homo sapiens
VYINDSVELSQNEQK

SEQ ID NO: 1248 - protein, 17 aa, Homo sapiens
DQECDKFNQCGTCNEFK

SEQ ID NO: 1249 - protein, 50 aa, Homo sapiens
GAWPSTLLSVQNVIDCGNAGSCEGGNDLSVWDYAHQHGIPDETCNNYQAK

SEQ ID NO: 1250 - protein, 39 aa, Homo sapiens
LANYTGGIYAEYQDTTYINHVVSVAGWGISDGTEYWIVR

SEQ ID NO: 1251 - protein, 23 aa, Homo sapiens
NQHIPQYCGSCWAHASTSAMADR

SEQ ID NO: 1252 - protein, 12 aa, Homo sapiens
NVDGVNYASITR

SEQ ID NO: 1253 - protein, 12 aa, Homo sapiens
PHEYLSPADLPK

SEQ ID NO: 1254 - protein, 17 aa, Homo sapiens
STYPRPHEYLSPADLPK

SEQ ID NO: 1255 - protein, 16 aa, Homo sapiens
YNLAIEEHCTFGDPIV

SEQ ID NO: 1256 - protein, 25 aa, Homo sapiens
EALPSWLHWDSQSHTLEGLPLDTDK

SEQ ID NO: 1257 - protein, 20 aa, Homo sapiens
EGAMSAQLGYPVVGWHIANK

SEQ ID NO: 1258 - protein, 21 aa, Homo sapiens
EGAMSAQLGYPVVGWHIANKK

SEQ ID NO: 1259 - protein, 15 aa, Homo sapiens
LFDMSAFMAGPGNAK

SEQ ID NO: 1260 - protein, 31 aa, Homo sapiens
LGANGSHIPQTSSVFSIEVYPEDHSELQSVR

SEQ ID NO: 1261 - protein, 21 aa, Homo sapiens
LGCSLNQNSVPDIHGVEAPAR

SEQ ID NO: 1262 - protein, 8 aa, Homo sapiens
LVPVVNNR

SEQ ID NO: 1263 - protein, 12 aa, Homo sapiens
NCSTITLQNITR

SEQ ID NO: 1264 - protein, 33 aa, Homo sapiens
TASPDPGEVVSSACAADEPVTVLTVILDADLTK

SEQ ID NO: 1265 - protein, 12 aa, Homo sapiens
VDAWVGTYFEVK

SEQ ID NO: 1266 - protein, 16 aa, Homo sapiens
VTIPTDLIASSGDIIK

SEQ ID NO: 1267 - protein, 11 aa, Homo sapiens
VVENGALLSWK

SEQ ID NO: 1268 - protein, 43 aa, Homo sapiens
FFVVNTDSLSSVTNATSIQITAPASMLIGDHYLCDVTWATQER

SEQ ID NO: 1269 - protein, 17 aa, Homo sapiens
FRPSEPHFTLDGNSFYK

SEQ ID NO: 1270 - protein, 24 aa, Homo sapiens
GTWEVIGIEALTSDYLYYISNEYK

SEQ ID NO: 1271 - protein, 14 aa, Homo sapiens
HSYTASYDIYDLNK

SEQ ID NO: 1272 - protein, 16 aa, Homo sapiens
IPNNTQWVTWSPVGHK

SEQ ID NO: 1273 - protein, 18 aa, Homo sapiens
IQNYSVMDICDYDESSGR

SEQ ID NO: 1274 - protein, 7 aa, Homo sapiens
ISLQWLR

SEQ ID NO: 1275 - protein, 11 aa, Homo sapiens
KLDFIILNETK

SEQ ID NO: 1276 - protein, 12 aa, Homo sapiens
LAYVWNNDIYVK

SEQ ID NO: 1277 - protein, 10 aa, Homo sapiens
LDFIILNETK

SEQ ID NO: 1278 - protein, 14 aa, Homo sapiens
LGTFEVEDQIEAAR

SEQ ID NO: 1279 - protein, 21 aa, Homo sapiens
LNWATYLASTENIIVASFDGR

SEQ ID NO: 1280 - protein, 19 aa, Homo sapiens
RIQNYSVMDICDYDESSGR

SEQ ID NO: 1281 - protein, 9 aa, Homo sapiens
TYTLTDYLK

SEQ ID NO: 1282 - protein, 12 aa, Homo sapiens
VTCLSCELNPER

SEQ ID NO: 1283 - protein, 20 aa, Homo sapiens
WNCLVARQHIEMSTTGWVGR

SEQ ID NO: 1284 - protein, 15 aa, Homo sapiens
YMGLPTPEDNLDHYR

SEQ ID NO: 1285 - protein, 22 aa, Homo sapiens
YMGLPTPEDNLDHYRNSTVMSR

SEQ ID NO: 1286 - protein, 7 aa, Homo sapiens
ANYTILK

SEQ ID NO: 1287 - protein, 29 aa, Homo sapiens
EQYESFEIIAFATTPDGYTPELPLPLIIK

SEQ ID NO: 1288 - protein, 19 aa, Homo sapiens
LSYQNDPPFGSYVVPITVR

SEQ ID NO: 1289 - protein, 18 aa, Homo sapiens
LTDPTGWVTIDENTGSIK

SEQ ID NO: 1290 - protein, 16 aa, Homo sapiens
NGIYNITVLASDQGGR

SEQ ID NO: 1291 - protein, 17 aa, Homo sapiens
QQMILQIGVVNEAPFSR

SEQ ID NO: 1292 - protein, 14 aa, Homo sapiens
SFTILLSNTENQEK

SEQ ID NO: 1293 - protein, 22 aa, Homo sapiens
TCTGTLGIILQDVNDNSPFIPK

SEQ ID NO: 1294 - protein, 17 aa, Homo sapiens
TNEGVLCVVKPLNYEEK

SEQ ID NO: 1295 - protein, 18 aa, Homo sapiens
TSYVTSVEENTVDVEILR

SEQ ID NO: 1296 - protein, 41 aa, Homo sapiens
TVIICKPTMSSAEIVAVDPDEPIHGPPFDFSLESSTSEVQR

SEQ ID NO: 1297 - protein, 15 aa, Homo sapiens
VTVEDKDLVNTANWR

SEQ ID NO: 1298 - protein, 13 aa, Homo sapiens
YTYSEWHSFTQPR

SEQ ID NO: 1299 - protein, 19 aa, Homo sapiens
ACSTSEMMEEKPHILGDIK

SEQ ID NO: 1300 - protein, 20 aa, Homo sapiens
AGNDLIESSAGEEASNLQNK

SEQ ID NO: 1301 - protein, 8 aa, Homo sapiens
AIEIELAK

SEQ ID NO: 1302 - protein, 26 aa, Homo sapiens
CANGLGNDNSSNTLNTDYSFLEINNK

SEQ ID NO: 1303 - protein, 22 aa, Homo sapiens
DYELQTMTYRAMVDSQQKSPVK

SEQ ID NO: 1304 - protein, 16 aa, Homo sapiens
EVQIPELSQVFVEDVK

SEQ ID NO: 1305 - protein, 11 aa, Homo sapiens
ENLLNHEMVLK

SEQ ID NO: 1306 - protein, 10 aa, Homo sapiens
IDQILESLER

SEQ ID NO: 1307 - protein, 12 aa, Homo sapiens
LEMSAVADIFDR

SEQ ID NO: 1308 - protein, 25 aa, Homo sapiens
LESGVQFQNEAEIAGYILECENLLR

SEQ ID NO: 1309 - protein, 18 aa, Homo sapiens
NIQNFPSDLIENPIMKSK

SEQ ID NO: 1310 - protein, 15 aa, Homo sapiens
QNVDQALLNGLELLK

SEQ ID NO: 1311 - protein, 14 aa, Homo sapiens
SAETNIDQDINNLK

SEQ ID NO: 1312 - protein, 23 aa, Homo sapiens
SELNVVLQNMNQVYSMSSTYIDK

SEQ ID NO: 1313 - protein, 9 aa, Homo sapiens
SFSDWVSEK

SEQ ID NO: 1314 - protein, 18 aa, Homo sapiens
SPVQFENLEEIFDTSVSK

SEQ ID NO: 1315 - protein, 20 aa, Homo sapiens
STVMVRVGGGWMALDEFLVK

SEQ ID NO: 1316 - protein, 16 aa, Homo sapiens
SVVSWHYLINEIDRIR

SEQ ID NO: 1317 - protein, 14 aa, Homo sapiens
VAQALCEDLSALVK

SEQ ID NO: 1318 - protein, 20 aa, Homo sapiens
VNNSGISLCNLISAVTTPAK

SEQ ID NO: 1319 - protein, 28 aa, Homo sapiens
ACPSHQPDISSGLELPFPPGVPTLDNIK

SEQ ID NO: 1320 - protein, 8 aa, Homo sapiens
APYPNYDR

SEQ ID NO: 1321 - protein, 8 aa, Homo sapiens
AWEDTLDK

SEQ ID NO: 1322 - protein, 12 aa, Homo sapiens
AWEDTLDKYCDR

SEQ ID NO: 1323 - protein, 17 aa, Homo sapiens
CCDLPFPEQACCAEEEK

SEQ ID NO: 1324 - protein, 9 aa, Homo sapiens
DILTIDIGR

SEQ ID NO: 1325 - protein, 24 aa, Homo sapiens
DPALCCYLSPGDEQVNCFNINYLR

SEQ ID NO: 1326 - protein, 10 aa, Homo sapiens
ELLALIQLER

SEQ ID NO: 1327 - protein, 12 aa, Homo sapiens
ELPSLQHPNEQK

SEQ ID NO: 1328 - protein, 15 aa, Homo sapiens
EVGPPLPQEAVPLQK

SEQ ID NO: 1329 - protein, 9 aa, Homo sapiens
FCEAEFSVK

SEQ ID NO: 1330 - protein, 16 aa, Homo sapiens
FSCFQEEAPQPHYQLR

SEQ ID NO: 1331 - protein, 20 aa, Homo sapiens
GQGEQGSTGGTNISSTSEPK

SEQ ID NO: 1332 - protein, 12 aa, Homo sapiens
HIPGLIHNMTAR

SEQ ID NO: 1333 - protein, 14 aa, Homo sapiens
HKHIPGLIHNMTAR

SEQ ID NO: 1334 - protein, 22 aa, Homo sapiens
LDGFPPGRPSPDNLNQICLPNR

SEQ ID NO: 1335 - protein, 10 aa, Homo sapiens
LLPAQLPAEK

SEQ ID NO: 1336 - protein, 11 aa, Homo sapiens
LTFINDLCGPR

SEQ ID NO: 1337 - protein, 9 aa, Homo sapiens
LVWEEAMSR

SEQ ID NO: 1338 - protein, 10 aa, Homo sapiens
NLPATDPLQR

SEQ ID NO: 1339 - protein, 13 aa, Homo sapiens
NVALVSGDTENAK

SEQ ID NO: 1340 - protein, 14 aa, Homo sapiens
PSPDNLNQICLPNR

SEQ ID NO: 1341 - protein, 14 aa, Homo sapiens
QGETLNFLEIGYSR

SEQ ID NO: 1342 - protein, 10 aa, Homo sapiens
QGNNHTCTWK

SEQ ID NO: 1343 - protein, 20 aa, Homo sapiens
QHVVYGPWNLPQSSYSHLTR

SEQ ID NO: 1344 - protein, 22 aa, Homo sapiens
SLPMDHPDSSQHGPPFEGQSGK

SEQ ID NO: 1345 - protein, 37 aa, Homo sapiens
SLPMDHPDSSQHGPPFEGQSQVQPPPSQEATPLQQEK

SEQ ID NO: 1346 - protein, 9 aa, Homo sapiens
ADQVCINLR

SEQ ID NO: 1347 - protein, 13 aa, Homo sapiens
CVNHYGGYLCLPK

SEQ ID NO: 1348 - protein, 13 aa, Homo sapiens
DIDECDIVPDACK

SEQ ID NO: 1349 - protein, 13 aa, Homo sapiens
EDEMCWNYHGGFR

SEQ ID NO: 1350 - protein, 18 aa, Homo sapiens
EHIVDLEMLTVSSIGTFR

SEQ ID NO: 1351 - protein, 9 aa, Homo sapiens
ELPQSIVYK

SEQ ID NO: 1352 - protein, 13 aa, Homo sapiens
FSCMCPQGYQVVR

SEQ ID NO: 1353 - protein, 19 aa, Homo sapiens
GEQCVDIDECTIPPYCHQR

SEQ ID NO: 1354 - protein, 13 aa, Homo sapiens
GSFACQCPPGYQK

SEQ ID NO: 1355 - protein, 29 aa, Homo sapiens
IQCAAGYEQSEHNVCQDIDECTAGTHNCR

SEQ ID NO: 1356 - protein, 10 aa, Homo sapiens
LNCEDIDECR

SEQ ID NO: 1357 - protein, 10 aa, Homo sapiens
LTIIVGPFSF

SEQ ID NO: 1358 - protein, 14 aa, Homo sapiens
NPCQDPYILTPENR

SEQ ID NO: 1359 - protein, 13 aa, Homo sapiens
QTSPVSAMLVLVK

SEQ ID NO: 1360 - protein, 20 aa, Homo sapiens
RGEQCVDIDECTIPPYCHQR

SEQ ID NO: 1361 - protein, 11 aa, Homo sapiens
SGNENGEFYLR

SEQ ID NO: 1362 - protein, 23 aa, Homo sapiens
SVPSDIFQIQATTIYANTINTFR

SEQ ID NO: 1363 - protein, 61 aa, Homo sapiens
TAQIIVNNEQPQQETQPAEGTSGATTGVVAASSMATSGVLPGGGFVASAAAVAGPEMQTGR

SEQ ID NO: 1364 - protein, 15 aa, Homo sapiens
TCQDINECETTNECR

SEQ ID NO: 1365 - protein, 20 aa, Homo sapiens
HHDYYITSTSNGSLEGLENR

SEQ ID NO: 1366 - protein, 21 aa, Homo sapiens
KHHDYYITSTSNGSLEGLENR

SEQ ID NO: 1367 - protein, 13 aa, Homo sapiens
NLEPVSWSSLNPK

SEQ ID NO: 1368 - protein, 15 aa, Homo sapiens
ARPHAWPFMVSLQLR

SEQ ID NO: 1369 - protein, 28 aa, Homo sapiens
GGCASGLYPDAFAPVAQFVNWIDSIIQR

SEQ ID NO: 1370 - protein, 28 aa, Homo sapiens
GGHFCGATLIAPNFVMSAAHCVANVNVR

SEQ ID NO: 1371 - protein, 19 aa, Homo sapiens
GIASVLQELNVTVVTSLCR

SEQ ID NO: 1372 - protein, 17 aa, Homo sapiens
LGNGVQCLAMGWGLLGR

SEQ ID NO: 1373 - protein, 27 aa, Homo sapiens
QAGVCFGDSGSPLVCNGLIHGIASFVR

SEQ ID NO: 1374 - protein, 10 aa, Homo sapiens
VVLGAHNLSR

SEQ ID NO: 1375 - protein, 23 aa, Homo sapiens
AEEHTVVLTVTGEPCHFPFQYHR

SEQ ID NO: 1376 - protein, 8 aa, Homo sapiens
CFEPQLLR

SEQ ID NO: 1377 - protein, 45 aa, Homo sapiens
CSAPDVHGSSILPGMLCAGFLEGGTDACQGDSGGPLVCEDQAAER

SEQ ID NO: 1378 - protein, 8 aa, Homo sapiens
EQPPSLTR

SEQ ID NO: 1379 - protein, 26 aa, Homo sapiens
GGTCVNMPSGPHCLCPQHLTGNHCQK

SEQ ID NO: 1380 - protein, 20 aa, Homo sapiens
GRPGPQPWCATTPNFDQDQR

SEQ ID NO: 1381 - protein, 18 aa, Homo sapiens
LCHCPVGYTGAFCDVDTK

SEQ ID NO: 1382 - protein, 18 aa, Homo sapiens
LHEAFSPVSYQHDLALLR

SEQ ID NO: 1383 - protein, 14 aa, Homo sapiens
LHVPLMPAQPAPPK

SEQ ID NO: 1384 - protein, 27 aa, Homo sapiens
LQEDADGSCALLSPYVQPVCLPSGAAR

SEQ ID NO: 1385 - protein, 26 aa, Homo sapiens
LSWEYCDLAQCQTPTQAAPPTPVSPR

SEQ ID NO: 1386 - protein, 16 aa, Homo sapiens
LTLQGIISWGSGCGDR

SEQ ID NO: 1387 - protein, 6 aa, Homo sapiens
NEIWYR

SEQ ID NO: 1388 - protein, 13 aa, Homo sapiens
NHSCEPCQTLAVR

SEQ ID NO: 1389 - protein, 17 aa, Homo sapiens
NKPGVYTDVAYYLAWIR

SEQ ID NO: 1390 - protein, 15 aa, Homo sapiens
NPDNDIRPWCFVLNR

SEQ ID NO: 1391 - protein, 11 aa, Homo sapiens
NWGLGGHAFCR

SEQ ID NO: 1392 - protein, 14 aa, Homo sapiens
PAPEDLTVVLGQER

SEQ ID NO: 1393 - protein, 18 aa, Homo sapiens
PGPQPWCATTPNFDQDQR

SEQ ID NO: 1394 - protein, 15 aa, Homo sapiens
PGVYTDVAYYLAWIR

SEQ ID NO: 1395 - protein, 38 aa, Homo sapiens
PSETTLCQVAGWGHQFEGAEEYASFLQEAQVPFLSLER

SEQ ID NO: 1396 - protein, 17 aa, Homo sapiens
RLTLQGIISWGSGCGDR

SEQ ID NO: 1397 - protein, 18 aa, Homo sapiens
TTLSGAPCQPWASEATYR

SEQ ID NO: 1398 - protein, 26 aa, Homo sapiens
TTLSGAPCQPWASEATYRNVTAEQAR

SEQ ID NO: 1399 - protein, 9 aa, Homo sapiens
VVGGLVALR

SEQ ID NO: 1400 - protein, 8 aa, Homo sapiens
WGYCLEPK

SEQ ID NO: 1401 - protein, 25 aa, Homo sapiens
YKAEEHTVVLTVTGEPCHFPFQYHR

SEQ ID NO: 1402 - protein, 11 aa, Homo sapiens
CFDHHFLEGSR

SEQ ID NO: 1403 - protein, 8 aa, Homo sapiens
CNEYYLLR

SEQ ID NO: 1404 - protein, 15 aa, Homo sapiens
CTKPDLSNGYISDVK

SEQ ID NO: 1405 - protein, 11 aa, Homo sapiens
CPPPPLPINSK

SEQ ID NO: 1406 - protein, 19 aa, Homo sapiens
DEEVVQCLSDGWSSQPTCR

SEQ ID NO: 1407 - protein, 17 aa, Homo sapiens
DKVQYECATGYYTAGGK

SEQ ID NO: 1408 - protein, 28 aa, Homo sapiens
EAYCLDGMWTTPPLCLEPCTLSFTEMEK

SEQ ID NO: 1409 - protein, 20 aa, Homo sapiens
EHETCLAPELYNGNYSTTQK

SEQ ID NO: 1410 - protein, 16 aa, Homo sapiens
GDTYPAELYITGSILR

SEQ ID NO: 1411 - protein, 10 aa, Homo sapiens
GMCTSPPLIK

SEQ ID NO: 1412 - protein, 22 aa, Homo sapiens
HGEIVHIECELNFEIHGSAEIR

SEQ ID NO: 1413 - protein, 21 aa, Homo sapiens
HGVIISSTVDTYENGSSVEYR

SEQ ID NO: 1414 - protein, 27 aa, Homo sapiens
HPPVVMNGAVADGILASYATGSSVEYR

SEQ ID NO: 1415 - protein, 9 aa, Homo sapiens
IAQYYYTFK

SEQ ID NO: 1416 - protein, 21 aa, Homo sapiens
KEHETCLAPELYNGNYSTTQK

SEQ ID NO: 1417 - protein, 17 aa, Homo sapiens
KTEEVECLTYGWSLTPK

SEQ ID NO: 1418 - protein, 11 aa, Homo sapiens
LIENGYFHPVK

SEQ ID NO: 1419 - protein, 15 aa, Homo sapiens
LSFFCLAGYTTESGR

SEQ ID NO: 1420 - protein, 17 aa, Homo sapiens
QEEQTTCTTEGWSPEPR

SEQ ID NO: 1421 - protein, 20 aa, Homo sapiens
QGYDLSPLTPLSELSVQCNR

SEQ ID NO: 1422 - protein, 11 aa, Homo sapiens
QSTLSYQEPLR

SEQ ID NO: 1423 - protein, 12 aa, Homo sapiens
QSTLSYQEPLRT

SEQ ID NO: 1424 - protein, 42 aa, Homo sapiens
QTYEEGDVVQFFCHENYYLSGSDLIQCYNFGWYPESPVCEGR

SEQ ID NO: 1425 - protein, 10 aa, Homo sapiens
SFYFPMSIDK

SEQ ID NO: 1426 - protein, 15 aa, Homo sapiens
SGYLLHGSNEITCNR

SEQ ID NO: 1427 - protein, 16 aa, Homo sapiens
TEEVECLTYGWSLTPK

SEQ ID NO: 1428 - protein, 24 aa, Homo sapiens
TTGGKDEEVVQCLSDGWSSQPTCR

SEQ ID NO: 1429 - protein, 19 aa, Homo sapiens
VACEEPPFIENGAANLHSK

SEQ ID NO: 1430 - protein, 12 aa, Homo sapiens
VLHGDLIDFVCK

SEQ ID NO: 1431 - protein, 15 aa, Homo sapiens
VQYECATGYYTAGGK

SEQ ID NO: 1432 - protein, 20 aa, Homo sapiens
WDFDNRPHILHGEYIEFICR

SEQ ID NO: 1433 - protein, 20 aa, Homo sapiens
WSSPPVCLEPCTVNVDYMNR

SEQ ID NO: 1434 - protein, 15 aa, Homo sapiens
WTLPPECVENNENCK

SEQ ID NO: 1435 - protein, 9 aa, Homo sapiens
ANTFLEEVR

SEQ ID NO: 1436 - protein, 20 aa, Homo sapiens
DKLAACLEGNCAEGLGTNYR

SEQ ID NO: 1437 - protein, 27 aa, Homo sapiens
DKLAACLEGNCAEGLGTNYRGHVNITR

SEQ ID NO: 1438 - protein, 10 aa, Homo sapiens
ELLESYIDGR

SEQ ID NO: 1439 - protein, 12 aa, Homo sapiens
ETAASLLQAGYK

SEQ ID NO: 1440 - protein, 9 aa, Homo sapiens
ETWTANVGK

SEQ ID NO: 1441 - protein, 15 aa, Homo sapiens
GDACEGDSGGPFVMK

SEQ ID NO: 1442 - protein, 16 aa, Homo sapiens
GQPSVLQVVNLPIVER

SEQ ID NO: 1443 - protein, 20 aa, Homo sapiens
GQPSVLQVVNLPIVERPVCK

SEQ ID NO: 1444 - protein, 16 aa, Homo sapiens
HQDFNSAVQLVENFCR

SEQ ID NO: 1445 - protein, 11 aa, Homo sapiens
ITDNMFCAGYK

SEQ ID NO: 1446 - protein, 16 aa, Homo sapiens
ITDNMFCAGYKPDEGK

SEQ ID NO: 1447 - protein, 17 aa, Homo sapiens
ITDNMFCAGYKPDEGKR

SEQ ID NO: 1448 - protein, 20 aa, Homo sapiens
IVEGSDAEIGMSPWQVMLFR

SEQ ID NO: 1449 - protein, 17 aa, Homo sapiens
KPVAFSDYIHPVCLPDR

SEQ ID NO: 1450 - protein, 29 aa, Homo sapiens
KPVAFSDYIHPVCLPDRETAASLLQAGYK

SEQ ID NO: 1451 - protein, 16 aa, Homo sapiens
KSPQELLCGASLISDR

SEQ ID NO: 1452 - protein, 18 aa, Homo sapiens
LAACLEGNCAEGLGTNYR

SEQ ID NO: 1453 - protein, 25 aa, Homo sapiens
LAACLEGNCAEGLGTNYRGHVNITR

SEQ ID NO: 1454 - protein, 19 aa, Homo sapiens
LAVTTHGLPCLAWASAQAK

SEQ ID NO: 1455 - protein, 19 aa, Homo sapiens
LKKPVAFSDYIHPVCLPDR

SEQ ID NO: 1456 - protein, 10 aa, Homo sapiens
NFTENDLLVR

SEQ ID NO: 1457 - protein, 16 aa, Homo sapiens
NPDGDEEGVWCYVAGK

SEQ ID NO: 1458 - protein, 19 aa, Homo sapiens
NPDSSTTGPWCYTTDPTVR

SEQ ID NO: 1459 - protein, 20 aa, Homo sapiens
NPDSSTTGPWCYTTDPTVRR

SEQ ID NO: 1460 - protein, 19 aa, Homo sapiens
PEINSTTHPGADLQENFCR

SEQ ID NO: 1461 - protein, 30 aa, Homo sapiens
PGDFGYCDLNYCEEAVEEETGDGLDEDSDR

SEQ ID NO: 1462 - protein, 16 aa, Homo sapiens
PVAFSDYIHPVCLPDR

SEQ ID NO: 1463 - protein, 28 aa, Homo sapiens
PVAFSDYIHPVCLPDRETAASLLQAGYK

SEQ ID NO: 1464 - protein, 20 aa, Homo sapiens
QECSIPVCGQDQVTVAMTPR

SEQ ID NO: 1465 - protein, 16 aa, Homo sapiens
RGDACEGDSGGPFVMK

SEQ ID NO: 1466 - protein, 21 aa, Homo sapiens
RQECSIPVCGQDQVTVAMTPR

SEQ ID NO: 1467 - protein, 19 aa, Homo sapiens
SEGSSVNLSPPLEQCVPDR

SEQ ID NO: 1468 - protein, 26 aa, Homo sapiens
SEGSSVNLSPPLEQCVPDRGQQYQGR

SEQ ID NO: 1469 - protein, 9 aa, Homo sapiens
SGIECQLWR

SEQ ID NO: 1470 - protein, 15 aa, Homo sapiens
SPQELLCGASLISDR

SEQ ID NO: 1471 - protein, 41 aa, Homo sapiens
SPQELLCGASLISDRWVLTAAHCLLYPPWDKNFTENDLLVR

SEQ ID NO: 1472 - protein, 25 aa, Homo sapiens
SRYPHKPEINSTTHPGADLQENFCR

SEQ ID NO: 1473 - protein, 13 aa, Homo sapiens
TATSEYQTFFNPR

SEQ ID NO: 1474 - protein, 12 aa, Homo sapiens
TFGSGEADCGLR

SEQ ID NO: 1475 - protein, 17 aa, Homo sapiens
TFGSGEADCGLRPLFEK

SEQ ID NO: 1476 - protein, 8 aa, Homo sapiens
VTGWGNLK

SEQ ID NO: 1477 - protein, 17 aa, Homo sapiens
VTGWGNLKETWTANVGK

SEQ ID NO: 1478 - protein, 16 aa, Homo sapiens
WVLTAAHCLLYPPWDK

SEQ ID NO: 1479 - protein, 26 aa, Homo sapiens
WVLTAAHCLLYPPWDKNFTENDLLVR

SEQ ID NO: 1480 - protein, 15 aa, Homo sapiens
WYQMGIVSWGEGCDR

SEQ ID NO: 1481 - protein, 18 aa, Homo sapiens
WYQMGIVSWGEGCDRDGK

SEQ ID NO: 1482 - protein, 9 aa, Homo sapiens
YGFYTHVFR

SEQ ID NO: 1483 - protein, 23 aa, Homo sapiens
YPHKPEINSTTHPGADLQENFCR

SEQ ID NO: 1484 - protein, 8 aa, Homo sapiens
YTACETAR

SEQ ID NO: 1485 - protein, 24 aa, Homo sapiens
CHEGYSLLADGVSCTPTVEYPCGK

SEQ ID NO: 1486 - protein, 24 aa, Homo sapiens
DDQLICVNENGGCEQYCSDHTGTK

SEQ ID NO: 1487 - protein, 13 aa, Homo sapiens
FSLVSGWGQLLDR

SEQ ID NO: 1488 - protein, 14 aa, Homo sapiens
GATALELMVLNVPR

SEQ ID NO: 1489 - protein, 22 aa, Homo sapiens
KVGDSPNITEYMFCAGYSDGSK

SEQ ID NO: 1490 - protein, 19 aa, Homo sapiens
LHQPVVLTDHVVPLCLPER

SEQ ID NO: 1491 - protein, 30 aa, Homo sapiens
NCETHKDDQLICVNENGGCEQYCSDHTGTK

SEQ ID NO: 1492 - protein, 21 aa, Homo sapiens
NLIAVLGEHDLSEHDGDEQSR

SEQ ID NO: 1493 - protein, 23 aa, Homo sapiens
VAQVIIPSTYVPGTTNHDIALLR

SEQ ID NO: 1494 - protein, 21 aa, Homo sapiens
VGDSPNITEYMFCAGYSDGSK

SEQ ID NO: 1495 - protein, 10 aa, Homo sapiens
VSQYIEWLQK

SEQ ID NO: 1496 - protein, 13 aa, Homo sapiens
APCNIQMEDPTFK

SEQ ID NO: 1497 - protein, 12 aa, Homo sapiens
AWAYFSDVDLEK

SEQ ID NO: 1498 - protein, 11 aa, Homo sapiens
DFPILPGEIFK

SEQ ID NO: 1499 - protein, 16 aa, Homo sapiens
DFQITASGQYGQWAPK

SEQ ID NO: 1500 - protein, 15 aa, Homo sapiens
DLASGLIGPLLICYK

SEQ ID NO: 1501 - protein, 14 aa, Homo sapiens
DLNSGLIGALLVCR

SEQ ID NO: 1502 - protein, 27 aa, Homo sapiens
EAIQHESGILGPLLYGEVGDTLLIIFK

SEQ ID NO: 1503 - protein, 24 aa, Homo sapiens
ENGPMASDPLCLTYSYLSHVDLVK

SEQ ID NO: 1504 - protein, 9 aa, Homo sapiens
EWLQVDFQK

SEQ ID NO: 1505 - protein, 13 aa, Homo sapiens
FDDDNSPSFIQIR

SEQ ID NO: 1506 - protein, 24 aa, Homo sapiens
FHAINGYIMDTLPGLVMAQDQRIR

SEQ ID NO: 1507 - protein, 15 aa, Homo sapiens
GELNEHLGLLGPYIR

SEQ ID NO: 1508 - protein, 20 aa, Homo sapiens
GNSTGTLMVFFGNVDSSGIK

SEQ ID NO: 1509 - protein, 11 aa, Homo sapiens
HNIFNPPIIAR

SEQ ID NO: 1510 - protein, 13 aa, Homo sapiens
IHPQSWVHQIALR

SEQ ID NO: 1511 - protein, 14 aa, Homo sapiens
IQNVSSSDLLMLLR

SEQ ID NO: 1512 - protein, 14 aa, Homo sapiens
ISPNTSQQNFVTQR

SEQ ID NO: 1513 - protein, 9 aa, Homo sapiens
LHPTHYSIR

SEQ ID NO: 1514 - protein, 25 aa, Homo sapiens
LLESGLMNSQESSWGKNVSSTESGR

SEQ ID NO: 1515 - protein, 20 aa, Homo sapiens
MALYNLYPGVFETVEMLPSK

SEQ ID NO: 1516 - protein, 20 aa, Homo sapiens
MELMGCDLNSCSMPLGMESK

SEQ ID NO: 1517 - protein, 8 aa, Homo sapiens
NLFLLSTR

SEQ ID NO: 1518 - protein, 20 aa, Homo sapiens
NLFLTNLDNLHENNTHNQEK

SEQ ID NO: 1519 - protein, 18 aa, Homo sapiens
NMASHPVSLHAVGVSYWK

SEQ ID NO: 1520 - protein, 16 aa, Homo sapiens
PYSFYSSLISYEEDQR

SEQ ID NO: 1521 - protein, 14 aa, Homo sapiens
QFNATTIPENDIEK

SEQ ID NO: 1522 - protein, 11 aa, Homo sapiens
SFPFNTSVVYK

SEQ ID NO: 1523 - protein, 21 aa, Homo sapiens
SSPLTESGGPLSLSEENNDSK

SEQ ID NO: 1524 - protein, 15 aa, Homo sapiens
TLFVEFTDHLFNIAK

SEQ ID NO: 1525 - protein, 25 aa, Homo sapiens
TWVHYIAAEEEDWDYAPLVLAPDDR

SEQ ID NO: 1526 - protein, 13 aa, Homo sapiens
VDLLAPMIIHGIK

SEQ ID NO: 1527 - protein, 8 aa, Homo sapiens
VENTVLPK

SEQ ID NO: 1528 - protein, 16 aa, Homo sapiens
VLFQDNSSHLPAASYR

SEQ ID NO: 1529 - protein, 17 aa, Homo sapiens
VVFQEFTDGSFTQPLYR

SEQ ID NO: 1530 - protein, 26 aa, Homo sapiens
YETFSDDPSPGAIDSNNSLSEMTHFR

SEQ ID NO: 1531 - protein, 26 aa, Homo sapiens
DVDECALGTHNCSEAETCHNIQGSFR

SEQ ID NO: 1532 - protein, 19 aa, Homo sapiens
EGETCGAEDNDSCGISLYK

SEQ ID NO: 1533 - protein, 62 aa, Homo sapiens
HYEDPYSYDQEVAEVEAATALGGEVQAGAVQAGAGGPPAALGGGSQPLSTIQAPPWPAVLPR

SEQ ID NO: 1534 - protein, 24 aa, Homo sapiens
KPQVLPHSHVEEDTDPNSVHSIPR

SEQ ID NO: 1535 - protein, 21 aa, Homo sapiens
PSPHNILSTSLPDAAWIPPTR

SEQ ID NO: 1536 - protein, 12 aa, Homo sapiens
AGCVAESTAVCR

SEQ ID NO: 1537 - protein, 12 aa, Homo sapiens
AIGYATAADCGR

SEQ ID NO: 1538 - protein, 15 aa, Homo sapiens
AISGLTIDGHAVGAK

SEQ ID NO: 1539 - protein, 20 aa, Homo sapiens
ALASYVAACQAAGVVIEDWR

SEQ ID NO: 1540 - protein, 13 aa, Homo sapiens
APGWDPLCWDECR

SEQ ID NO: 1541 - protein, 17 aa, Homo sapiens
ASQHGSDVVIETDFGLR

SEQ ID NO: 1542 - protein, 23 aa, Homo sapiens
AVGGKPAGWQVGGAQGCGECVSK

SEQ ID NO: 1543 - protein, 54 aa, Homo sapiens
CGPGGGSLVCTPASCGLGEVCGLLPSGQHGCQPVSTAECQAWGDPHYVTLDGHR

SEQ ID NO: 1544 - protein, 15 aa, Homo sapiens
CLANGGIHYITLDGR

SEQ ID NO: 1545 - protein, 32 aa, Homo sapiens
CLLPGQSGPLCDALATYAAACQAAGATVHPWR

SEQ ID NO: 1546 - protein, 12 aa, Homo sapiens
CPGLQNTIPWYR

SEQ ID NO: 1547 - protein, 20 aa, Homo sapiens
CSCSSSSGLTCQAAGCPPGR

SEQ ID NO: 1548 - protein, 14 aa, Homo sapiens
CSVQNGLLGCYPDR

SEQ ID NO: 1549 - protein, 34 aa, Homo sapiens
CVPLNNGCGCWANGTYHEAGSEFWADGTCSQWCR

SEQ ID NO: 1550 - protein, 19 aa, Homo sapiens
EEFCGLLSSPTGPLSSCHK

SEQ ID NO: 1551 - protein, 29 aa, Homo sapiens
EGCVCDAGFVLSGDTCVPVGQCGCLHDDR

SEQ ID NO: 1552 - protein, 29 aa, Homo sapiens
EGCVCDAGFVLSGDTCVPVGQCGCLHDGR

SEQ ID NO: 1553 - protein, 30 aa, Homo sapiens
EQGGQGVCLPNYEATCWLWGDPHYHSFDGR

SEQ ID NO: 1554 - protein, 28 aa, Homo sapiens
EYPGQVLVDDVLQYLPFQAADGQVQVFR

SEQ ID NO: 1555 - protein, 14 aa, Homo sapiens
FAVLQENVAWGNGR

SEQ ID NO: 1556 - protein, 19 aa, Homo sapiens
FAVLQENVAWGNGRVSVTR

SEQ ID NO: 1557 - protein, 25 aa, Homo sapiens
FDFMGTCTYLLVGSCGQNAALPAFR

SEQ ID NO: 1558 - protein, 18 aa, Homo sapiens
FDFMGTCVYVLAQTCGTR

SEQ ID NO: 1559 - protein, 23 aa, Homo sapiens
FDFMGTCVYVLAQTCGTRPGLHR

SEQ ID NO: 1560 - protein, 34 aa, Homo sapiens
FDFQGTCEYLLSAPCHGPPLGAENFTVTVANEHR

SEQ ID NO: 1561 - protein, 18 aa, Homo sapiens
FGTCQGSGDPHYVSFDGR

SEQ ID NO: 1562 - protein, 21 aa, Homo sapiens
FLLSQGVCIPVQDCGCTHNGR

SEQ ID NO: 1563 - protein, 34 aa, Homo sapiens
FNFQGTCEYLLSAPCHGPPLGAENFTVTVANEHR

SEQ ID NO: 1564 - protein, 39 aa, Homo sapiens
FQDQVCGLCGNYNGDPADDFLTPDGALAPDAVEFASSWK

SEQ ID NO: 1565 - protein, 14 aa, Homo sapiens
GATTSPGVYELSSR

SEQ ID NO: 1566 - protein, 32 aa, Homo sapiens
GCGEGCGPQGCPVCLAEETAPYESNEACGQLR

SEQ ID NO: 1567 - protein, 13 aa, Homo sapiens
GCVLDVCMGGGDR

SEQ ID NO: 1568 - protein, 18 aa, Homo sapiens
GCVLDVCMGGGDRDILCK

SEQ ID NO: 1569 - protein, 12 aa, Homo sapiens
GEVGFVLVDNQR

SEQ ID NO: 1570 - protein, 33 aa, Homo sapiens
GGGQAANALAFGNSWQEETRPGCGATEPGDCPK

SEQ ID NO: 1571 - protein, 18 aa, Homo sapiens
GLCVLSVGANLTTFDGAR

SEQ ID NO: 1572 - protein, 13 aa, Homo sapiens
GLQAGDVVEFEVR

SEQ ID NO: 1573 - protein, 27 aa, Homo sapiens
GMVCQEHSCKPGQVCQPSGGILSCVTK

SEQ ID NO: 1574 - protein, 31 aa, Homo sapiens
HTTCNHVVEQLLPTSAWGTHYVVPTLASQSR

SEQ ID NO: 1575 - protein, 22 aa, Homo sapiens
IFQHAVVIHSDYAISVQALNAK

SEQ ID NO: 1576 - protein, 17 aa, Homo sapiens
KVTVRPGESVMVNISAK

SEQ ID NO: 1577 - protein, 22 aa, Homo sapiens
LCGACGNFDGDQTNDWHDSQEK

SEQ ID NO: 1578 - protein, 27 aa, Homo sapiens
LCGACGNFDGDQTNDWHDSQEKPAMEK

SEQ ID NO: 1579 - protein, 35 aa, Homo sapiens
LCGLCGNFNGNWSDDFVLPNGSAASSVETFGAAWR

SEQ ID NO: 1580 - protein, 31 aa, Homo sapiens
LDDGDYLCEDGCQNNCPACTPGQAQHYEGDR

SEQ ID NO: 1581 - protein, 15 aa, Homo sapiens
LDGPFAVCHDTLDPR

SEQ ID NO: 1582 - protein, 32 aa, Homo sapiens
LDGPFAVCHDTLDPRPFLEQCVYDLCVVGGER

SEQ ID NO: 1583 - protein, 12 aa, Homo sapiens
LDSLVAQQLQSK

SEQ ID NO: 1584 - protein, 22 aa, Homo sapiens
LDSLVAQQLQSKNECGILADPK

SEQ ID NO: 1585 - protein, 35 aa, Homo sapiens
LEQYEGPGFCGPLAPGTGGPFTTCHAHVPPESFFK

SEQ ID NO: 1586 - protein, 18 aa, Homo sapiens
LLFDGDAHLLMSIPSPFR

SEQ ID NO: 1587 - protein, 24 aa, Homo sapiens
LLISSLSESPASVSILSQADNTSK

SEQ ID NO: 1588 - protein, 25 aa, Homo sapiens
LLISSLSESPASVSILSQADNTSKK

SEQ ID NO: 1589 - protein, 33 aa, Homo sapiens
LLVTVAGQVVSLAQGQQVTVDGEAVALPVAVGR

SEQ ID NO: 1590 - protein, 9 aa, Homo sapiens
LPVSLSEGR

SEQ ID NO: 1591 - protein, 11 aa, Homo sapiens
LPVVLANGQIR

SEQ ID NO: 1592 - protein, 27 aa, Homo sapiens
LRVPAAYAGSLCGLCGNYNQDPADDLK

SEQ ID NO: 1593 - protein, 42 aa, Homo sapiens
LTWEAVPGSEFSYAEVELGTADMIHTAEATTNLGLLTFGLAK

SEQ ID NO: 1594 - protein, 9 aa, Homo sapiens
LVDPQGPLK

SEQ ID NO: 1595 - protein, 25 aa, Homo sapiens
NEVTYDPYLVLIPDVAAYCPAYVVK

SEQ ID NO: 1596 - protein, 25 aa, Homo sapiens
NPNNDQVFPNGTLAPSIPIWGGSWR

SEQ ID NO: 1597 - protein, 20 aa, Homo sapiens
NPQGPFATCQAVLSPSEYFR

SEQ ID NO: 1598 - protein, 18 aa, Homo sapiens
PAGWQVGGAQGCGECVSK

SEQ ID NO: 1599 - protein, 30 aa, Homo sapiens
PDTAELTLLRPIQALGTEYFVLTPPGTSAR

SEQ ID NO: 1600 - protein, 17 aa, Homo sapiens
PFLEQCVYDLCVVGGER

SEQ ID NO: 1601 - protein, 12 aa, Homo sapiens
PGDEDFSIVLEK

SEQ ID NO: 1602 - protein, 12 aa, Homo sapiens
PGESVMVNISAK

SEQ ID NO: 1603 - protein, 17 aa, Homo sapiens
PGQVCQPSGGILSCVNK

SEQ ID NO: 1604 - protein, 17 aa, Homo sapiens
PGQVCQPSGGILSCVTK

SEQ ID NO: 1605 - protein, 20 aa, Homo sapiens
PIQALGTEYFVLTPPGTSAR

SEQ ID NO: 1606 - protein, 31 aa, Homo sapiens
PSGGSLGCVAVGSTTCQASGDPHYTTFDGHR

SEQ ID NO: 1607 - protein, 30 aa, Homo sapiens
PSGGSLGCVAVGSTTCQASGDPHYTTFDGR

SEQ ID NO: 1608 - protein, 17 aa, Homo sapiens
SLAAYTAACQAAGVAVK

SEQ ID NO: 1609 - protein, 20 aa, Homo sapiens
SLAAYTAACQAAGVAVKPWR

SEQ ID NO: 1610 - protein, 14 aa, Homo sapiens
SPANCPLSCPANSR

SEQ ID NO: 1611 - protein, 16 aa, Homo sapiens
SVPGCEGVALVVAQTK

SEQ ID NO: 1612 - protein, 16 aa, Homo sapiens
SVTLQIYNHSLTLSAR

SEQ ID NO: 1613 - protein, 18 aa, Homo sapiens
TCQGSCAALSGLTGCTTR

SEQ ID NO: 1614 - protein, 14 aa, Homo sapiens
TDFGLTVTYDWNAR

SEQ ID NO: 1615 - protein, 20 aa, Homo sapiens
TDSFCPLHCPAHSHYSICTR

SEQ ID NO: 1616 - protein, 22 aa, Homo sapiens
TEAVGQVHIFFQDGMVTLTPNK

SEQ ID NO: 1617 - protein, 9 aa, Homo sapiens
TPDGSLLVR

SEQ ID NO: 1618 - protein, 20 aa, Homo sapiens
TVLSPVEPSCEGMQCAAGQR

SEQ ID NO: 1619 - protein, 10 aa, Homo sapiens
VAYDLVYYVR

SEQ ID NO: 1620 - protein, 22 aa, Homo sapiens
VDVTLPSSYHGAVCGLCGNMDR

SEQ ID NO: 1621 - protein, 12 aa, Homo sapiens
VITVQVANFTLR

SEQ ID NO: 1622 - protein, 16 aa, Homo sapiens
VNGVLTALPVSVADGR

SEQ ID NO: 1623 - protein, 25 aa, Homo sapiens
VPAAYAASLCGLCGNYNQDPADDLK

SEQ ID NO: 1624 - protein, 25 aa, Homo sapiens
VPAAYAGSLCGLCGNYNQDPADDLK

SEQ ID NO: 1625 - protein, 27 aa, Homo sapiens
VPSSYAEALCGLCGNFNGDPADDLALR

SEQ ID NO: 1626 - protein, 18 aa, Homo sapiens
VRVNGVLTALPVSVADGR

SEQ ID NO: 1627 - protein, 10 aa, Homo sapiens
VSYVGLVTVR

SEQ ID NO: 1628 - protein, 18 aa, Homo sapiens
VTASSPVAVLSGHSCAQK

SEQ ID NO: 1629 - protein, 21 aa, Homo sapiens
VTLQPYNVAQLQSSVDLSGSK

SEQ ID NO: 1630 - protein, 9 aa, Homo sapiens
VTVNGVDMK

SEQ ID NO: 1631 - protein, 20 aa, Homo sapiens
VTVNGVDMKLPVVLANGQIR

SEQ ID NO: 1632 - protein, 23 aa, Homo sapiens
VTVPGNYYQLMCGLCGNYNGDPK

SEQ ID NO: 1633 - protein, 23 aa, Homo sapiens
VTVPGNYYQQMCGLCGNYNGDPK

SEQ ID NO: 1634 - protein, 16 aa, Homo sapiens
VTVRPGESVMVNISAK

SEQ ID NO: 1635 - protein, 11 aa, Homo sapiens
VVAEVQICHGK

SEQ ID NO: 1636 - protein, 15 aa, Homo sapiens
VVTVAALGTNISIHK

SEQ ID NO: 1637 - protein, 20 aa, Homo sapiens
VVTVAALGTNISIHKDEIGK

SEQ ID NO: 1638 - protein, 22 aa, Homo sapiens
VVTVAALGTNISIHKDEIGKVR

SEQ ID NO: 1639 - protein, 27 aa, Homo sapiens
VVVCQEHSCKPGQVCQPSGGILSCVNK

SEQ ID NO: 1640 - protein, 36 aa, Homo sapiens
VVVCQEHSCKPGQVCQPSGGILSCVNKDPCHGVTCR

SEQ ID NO: 1641 - protein, 27 aa, Homo sapiens
VVVCQEHSCKPGQVCQPSGGILSCVTK

SEQ ID NO: 1642 - protein, 19 aa, Homo sapiens
VYDLHGSCSYVLAQVCHPK

SEQ ID NO: 1643 - protein, 31 aa, Homo sapiens
VYDLHGSCSYVLAQVCHPKPGDEDFSIVLEK

SEQ ID NO: 1644 - protein, 13 aa, Homo sapiens
YDLAFVVASQATK

SEQ ID NO: 1645 - protein, 24 aa, Homo sapiens
YELCGPACPTSCNGAAAPSNCSGR

SEQ ID NO: 1646 - protein, 16 aa, Homo sapiens
YLPVNSSLLTSDCSER

SEQ ID NO: 1647 - protein, 22 aa, Homo sapiens
YQKEEFCGLLSSPTGPLSSCHK

SEQ ID NO: 1648 - protein, 16 aa, Homo sapiens
YYPLGEVFYPGPECER

SEQ ID NO: 1649 - protein, 19 aa, Homo sapiens
YYPLGQTFYPGPGCDSLCR

SEQ ID NO: 1650 - protein, 11 aa, Homo sapiens
AVVFLEPQWYR

SEQ ID NO: 1651 - protein, 27 aa, Homo sapiens
CQTNLSTLSDPVQLEVHIGWLLLQAPR

SEQ ID NO: 1652 - protein, 12 aa, Homo sapiens
YFHHNSDFYIPK

SEQ ID NO: 1653 - protein, 10 aa, Homo sapiens
AIFYMNNPSR

SEQ ID NO: 1654 - protein, 18 aa, Homo sapiens
ASSQWVVGPSYFVEYLIK

SEQ ID NO: 1655 - protein, 16 aa, Homo sapiens
GCNDSDVLAVAGFALR

SEQ ID NO: 1656 - protein, 22 aa, Homo sapiens
GGLGSLFYLTLDVLETDCHVLR

SEQ ID NO: 1657 - protein, 34 aa, Homo sapiens
GPQEAFPVHLDLTTNPQGETLDISFLFLEPMEEK

SEQ ID NO: 1658 - protein, 12 aa, Homo sapiens
GSVQYLPDLDDK

SEQ ID NO: 1659 - protein, 17 aa, Homo sapiens
GSVQYLPDLDDKNSQEK

SEQ ID NO: 1660 - protein, 11 aa, Homo sapiens
IFFESVYGQCK

SEQ ID NO: 1661 - protein, 31 aa, Homo sapiens
IYMTCPDCPSSIPTDSSNHQVLEAATESLAK

SEQ ID NO: 1662 - protein, 8 aa, Homo sapiens
LVVLPFPK

SEQ ID NO: 1663 - protein, 13 aa, Homo sapiens
PTNLPKVEESQQK

SEQ ID NO: 1664 - protein, 20 aa, Homo sapiens
SQASSCSLQSSDSVPVGLCK

SEQ ID NO: 1665 - protein, 18 aa, Homo sapiens
TAECPGPAQNASPLVLPP

SEQ ID NO: 1666 - protein, 12 aa, Homo sapiens
VLYLAAYNCTLR

SEQ ID NO: 1667 - protein, 16 aa, Homo sapiens
VLYLAAYNCTLRPVSK

SEQ ID NO: 1668 - protein, 16 aa, Homo sapiens
DLAARNVLVTEDNVMK

SEQ ID NO: 1669 - protein, 19 aa, Homo sapiens
DLSDLISEMEMMKMIGKHK

SEQ ID NO: 1670 - protein, 25 aa, Homo sapiens
GNYTCIVENEYGSINHTYQLDVVER

SEQ ID NO: 1671 - protein, 13 aa, Homo sapiens
IGPDNLPYVQILK

SEQ ID NO: 1672 - protein, 22 aa, Homo sapiens
LSSSGTPMLAGVSEYELPEDPR

SEQ ID NO: 1673 - protein, 11 aa, Homo sapiens
PILQAGLPANK

SEQ ID NO: 1674 - protein, 15 aa, Homo sapiens
SPHRPILQAGLPANK

SEQ ID NO: 1675 - protein, 17 aa, Homo sapiens
TAGVNTTDKEMEVLHLR

SEQ ID NO: 1676 - protein, 21 aa, Homo sapiens
DHDNYEGNCAEEDQSGWWFNR

SEQ ID NO: 1677 - protein, 12 aa, Homo sapiens
DYENGFGNFVQK

SEQ ID NO: 1678 - protein, 8 aa, Homo sapiens
IDLADFEK

SEQ ID NO: 1679 - protein, 27 aa, Homo sapiens
IKPLQSPAEFSVYCDMSDGGGWTVIQR

SEQ ID NO: 1680 - protein, 34 aa, Homo sapiens
NFYELNIGEYSGTAGDSLAGNFHPEVQWWASHQR

SEQ ID NO: 1681 - protein, 14 aa, Homo sapiens
NLHFLTTQEDYTLK

SEQ ID NO: 1682 - protein, 13 aa, Homo sapiens
QLLQENEVQFLDK

SEQ ID NO: 1683 - protein, 14 aa, Homo sapiens
QYADCSEIFNDGYK

SEQ ID NO: 1684 - protein, 15 aa, Homo sapiens
VFSFILVTTALTMGR

SEQ ID NO: 1685 - protein, 9 aa, Homo sapiens
LDGSTNFTR

SEQ ID NO: 1686 - protein, 15 aa, Homo sapiens
LHVGNYNGTAGDALR

SEQ ID NO: 1687 - protein, 16 aa, Homo sapiens
LNLVNMNNIENYVDSK

SEQ ID NO: 1688 - protein, 14 aa, Homo sapiens
VANLTFVVNSLDGK

SEQ ID NO: 1689 - protein, 34 aa, Homo sapiens
AAVYQPQPHPQPPPYGHCVTDSGVVYSVGMQWLK

SEQ ID NO: 1690 - protein, 35 aa, Homo sapiens
ATGVFTTLQPGSSIPPYNTEVTETTIVITWTPAPR

SEQ ID NO: 1691 - protein, 7 aa, Homo sapiens
ATITGYR

SEQ ID NO: 1692 - protein, 24 aa, Homo sapiens
CDPVDQCQDSETGTFYQIGDSWEK

SEQ ID NO: 1693 - protein, 18 aa, Homo sapiens
CFDHAAGTSYVVGETWEK

SEQ ID NO: 1694 - protein, 37 aa, Homo sapiens
CFDHAAGTSYVVGETWEKPYQGWMMVDCTCLGEGSGR

SEQ ID NO: 1695 - protein, 9 aa, Homo sapiens
CHEGGQSYK

SEQ ID NO: 1696 - protein, 7 aa, Homo sapiens
CNDQDTR

SEQ ID NO: 1697 - protein, 23 aa, Homo sapiens
DDKESVPISDTIIPAVPPPTDLR

SEQ ID NO: 1698 - protein, 35 aa, Homo sapiens
DDKESVPISDTIIPEVPQLTDLSFVDITDSSIGLR

SEQ ID NO: 1699 - protein, 24 aa, Homo sapiens
DLEVVAATPTSLLISWDAPAVTVR

SEQ ID NO: 1700 - protein, 11 aa, Homo sapiens
DLQFVEVTDVK

SEQ ID NO: 1701 - protein, 18 aa, Homo sapiens
DQCIVDDITYNVNDTFHK

SEQ ID NO: 1702 - protein, 19 aa, Homo sapiens
DQCIVDDITYNVNDTFHKR

SEQ ID NO: 1703 - protein, 14 aa, Homo sapiens
DSMIWDCTCIGAGR

SEQ ID NO: 1704 - protein, 22 aa, Homo sapiens
DTLTSRPAQGVVTTLENVSPPR

SEQ ID NO: 1705 - protein, 14 aa, Homo sapiens
EATIPGHLNSYTIK

SEQ ID NO: 1706 - protein, 58 aa, Homo sapiens
EDVDYHLYPHGPGLNPNASTGQEALSQTTISWAPFQDTSEYIISCHPVGTDEEPLQFR

SEQ ID NO: 1707 - protein, 18 aa, Homo sapiens
EESPLLIGQQSTVSDVPR

SEQ ID NO: 1708 - protein, 39 aa, Homo sapiens
EEVVTVGNSVNEGLNQPTDDSCFDPYTVSHYAVGDEWER

SEQ ID NO: 1709 - protein, 21 aa, Homo sapiens
EINLAPDSSSVVVSGLMVATK

SEQ ID NO: 1710 - protein, 32 aa, Homo sapiens
ESKPLTAQQTTKLDAPTNLQFVNETDSTVLVR

SEQ ID NO: 1711 - protein, 20 aa, Homo sapiens
ESVPISDTIIPAVPPPTDLR

SEQ ID NO: 1712 - protein, 32 aa, Homo sapiens
ESVPISDTIIPEVPQLTDLSFVDITDSSIGLR

SEQ ID NO: 1713 - protein, 28 aa, Homo sapiens
EVTSDSGSIVVSGLTPGVEYVYTIQVLR

SEQ ID NO: 1714 - protein, 16 aa, Homo sapiens
EYLGAICSCTCFGGQR

SEQ ID NO: 1715 - protein, 57 aa, Homo sapiens
FDFTTTSTSTPVTSNTVTGETTPFSPLVATSESVTEITASSFVVSWVSASDTVSGFR

SEQ ID NO: 1716 - protein, 22 aa, Homo sapiens
FGFCPMAAHEEICTTNEGVMYR

SEQ ID NO: 1717 - protein, 17 aa, Homo sapiens
FLATTPNSLLVSWQPPR

SEQ ID NO: 1718 - protein, 10 aa, Homo sapiens
FTNIGPDTMR

SEQ ID NO: 1719 - protein, 24 aa, Homo sapiens
FTQVTPTSLSAQWTPPNVQLTGYR

SEQ ID NO: 1720 - protein, 15 aa, Homo sapiens
GDSPASSKPISINYR

SEQ ID NO: 1721 - protein, 12 aa, Homo sapiens
GEWTCIAYSQLR

SEQ ID NO: 1722 - protein, 11 aa, Homo sapiens
GEWTCKPIAEK

SEQ ID NO: 1723 - protein, 17 aa, Homo sapiens
GFNCESKPEAEETCFDK

SEQ ID NO: 1724 - protein, 24 aa, Homo sapiens
GFNCESKPEAEETCFDKYTGNTYR

SEQ ID NO: 1725 - protein, 28 aa, Homo sapiens
GGNSNGALCHFPFLYNNHNYTDCTSEGR

SEQ ID NO: 1726 - protein, 29 aa, Homo sapiens
GGNSNGALCHFPFLYNNHNYTDCTSEGRR

SEQ ID NO: 1727 - protein, 48 aa, Homo sapiens
GIGEWHCQPLQTYPSSSGPVEVFITETPSQPNSHPIQWNAPQPSHISK

SEQ ID NO: 1728 - protein, 13 aa, Homo sapiens
GLAFTDVDVDSIK

SEQ ID NO: 1729 - protein, 25 aa, Homo sapiens
GLKPGVVYEGQLISIQQYGHQEVTR

SEQ ID NO: 1730 - protein, 13 aa, Homo sapiens
GNLLQCICTGNGR

SEQ ID NO: 1731 - protein, 7 aa, Homo sapiens
GNQESPK

SEQ ID NO: 1732 - protein, 16 aa, Homo sapiens
HEEGHMLNCTCFGQGR

SEQ ID NO: 1733 - protein, 21 aa, Homo sapiens
HRPRPYPPNVGEEIQIGHIPR

SEQ ID NO: 1734 - protein, 48 aa, Homo sapiens
HRPRPYPPNVGQEALSQTTISWAPFQDTSEYIISCHPVGTDEEPLQFR

SEQ ID NO: 1735 - protein, 18 aa, Homo sapiens
HTSVQTTSSGSGPFTDVR

SEQ ID NO: 1736 - protein, 10 aa, Homo sapiens
HYQINQQWER

SEQ ID NO: 1737 - protein, 7 aa, Homo sapiens
IGDQWDK

SEQ ID NO: 1738 - protein, 6 aa, Homo sapiens
IGDTWR

SEQ ID NO: 1739 - protein, 25 aa, Homo sapiens
IGDTWRRPHETGGYMLECVCLGNGK

SEQ ID NO: 1740 - protein, 7 aa, Homo sapiens
IGDTWSK

SEQ ID NO: 1741 - protein, 7 aa, Homo sapiens
ITGYIIK

SEQ ID NO: 1742 - protein, 16 aa, Homo sapiens
ITGYIIKYEKPGSPPR

SEQ ID NO: 1743 - protein, 44 aa, Homo sapiens
ITTTPTNGQQGNSLEEVVHADQSSCTFDNLSPGLEYNVSVYTVK

SEQ ID NO: 1744 - protein, 21 aa, Homo sapiens
ITYGETGGNSPVQEFTVPGSK

SEQ ID NO: 1745 - protein, 61 aa, Homo sapiens
IVYSPSVEGSSTELNLPETANSVTLSDLQPGVQYNITIYAVEENQESTPVVIQQETTGTPR

SEQ ID NO: 1746 - protein, 11 aa, Homo sapiens
IYLYTLNDNAR

SEQ ID NO: 1747 - protein, 30 aa, Homo sapiens
KTDELPQLVTLPHPNLHGPEILDVPSTVQK

SEQ ID NO: 1748 - protein, 40 aa, Homo sapiens
KTGQEALSQTTISWAPFQDTSEYIISCHPVGTDEEPLQFR

SEQ ID NO: 1749 - protein, 20 aa, Homo sapiens
LDAPTNLQFVNETDSTVLVR

SEQ ID NO: 1750 - protein, 13 aa, Homo sapiens
LGVRPSQGGEAPR

SEQ ID NO: 1751 - protein, 14 aa, Homo sapiens
LLCQCLGFGSGHFR

SEQ ID NO: 1752 - protein, 45 aa, Homo sapiens
NEEDVAELSISPSDNAVVLTNLLPGTEYVVSVSSVYEQHESTPLR

SEQ ID NO: 1753 - protein, 16 aa, Homo sapiens
NLQPASEYTVSLVAIK

SEQ ID NO: 1754 - protein, 23 aa, Homo sapiens
NLQPASEYTVSLVAIKGNQESPK

SEQ ID NO: 1755 - protein, 24 aa, Homo sapiens
NSITLTNLTPGTEYVVSIVALNGR

SEQ ID NO: 1756 - protein, 42 aa, Homo sapiens
NSITLTNLTPGTEYVVSIVALNGREESPLLIGQQSTVSDVPR

SEQ ID NO: 1757 - protein, 18 aa, Homo sapiens
NTFAEVTGLSPGVTYYFK

SEQ ID NO: 1758 - protein, 26 aa, Homo sapiens
NTFAEVTGLSPGVTYYFKVFAVSHGR

SEQ ID NO: 1759 - protein, 16 aa, Homo sapiens
PAQGVVTTLENVSPPR

SEQ ID NO: 1760 - protein, 17 aa, Homo sapiens
PAQGVVTTLENVSPPRR

SEQ ID NO: 1761 - protein, 21 aa, Homo sapiens
PGGEPSPEGTTGQSYNQYSQR

SEQ ID NO: 1762 - protein, 25 aa, Homo sapiens
PGVTEATITGLEPGTEYTIYVIALK

SEQ ID NO: 1763 - protein, 22 aa, Homo sapiens
PGVVYEGQLISIQQYGHQEVTR

SEQ ID NO: 1764 - protein, 7 aa, Homo sapiens
PISINYR

SEQ ID NO: 1765 - protein, 9 aa, Homo sapiens
PLTAQQTTK

SEQ ID NO: 1766 - protein, 9 aa, Homo sapiens
PQAPITGYR

SEQ ID NO: 1767 - protein, 27 aa, Homo sapiens
PRPGVTEATITGLEPGTEYTIYVIALK

SEQ ID NO: 1768 - protein, 46 aa, Homo sapiens
PRPYPPNVGQEALSQTTISWAPFQDTSEYIISCHPVGTDEEPLQFR

SEQ ID NO: 1769 - protein, 17 aa, Homo sapiens
PSQMQVTDVQDNSISVK

SEQ ID NO: 1770 - protein, 17 aa, Homo sapiens
PYPPNVGEEIQIGHIPR

SEQ ID NO: 1771 - protein, 44 aa, Homo sapiens
PYPPNVGQEALSQTTISWAPFQDTSEYIISCHPVGTDEEPLQFR

SEQ ID NO: 1772 - protein, 19 aa, Homo sapiens
PYQGWMMVDCTCLGEGSGR

SEQ ID NO: 1773 - protein, 18 aa, Homo sapiens
QAQQMVQPQSPVAVSQSK

SEQ ID NO: 1774 - protein, 26 aa, Homo sapiens
QAQQMVQPQSPVAVSQSKPGCYDNGK

SEQ ID NO: 1775 - protein, 18 aa, Homo sapiens
QDGHLWCSTTSNYEQDQK

SEQ ID NO: 1776 - protein, 29 aa, Homo sapiens
QKTGLDSPTGIDFSDITANSFTVHWIAPR

SEQ ID NO: 1777 - protein, 10 aa, Homo sapiens
QYNVGPSVSK

SEQ ID NO: 1778 - protein, 17 aa, Homo sapiens
RHEEGHMLNCTCFGQGR

SEQ ID NO: 1779 - protein, 22 aa, Homo sapiens
RPGGEPSPEGTTGQSYNQYSQR

SEQ ID NO: 1780 - protein, 19 aa, Homo sapiens
RPHETGGYMLECVCLGNGK

SEQ ID NO: 1781 - protein, 8 aa, Homo sapiens
SDTVPSPR

SEQ ID NO: 1782 - protein, 7 aa, Homo sapiens
SEPLIGR

SEQ ID NO: 1783 - protein, 19 aa, Homo sapiens
SSPVVIDASTAIDAPSNLR

SEQ ID NO: 1784 - protein, 9 aa, Homo sapiens
STATISGLK

SEQ ID NO: 1785 - protein, 24 aa, Homo sapiens
STATISGLKPGVDYTITVYAVTGR

SEQ ID NO: 1786 - protein, 10 aa, Homo sapiens
STTPDITGYR

SEQ ID NO: 1787 - protein, 14 aa, Homo sapiens
SYTITGLQPGTDYK

SEQ ID NO: 1788 - protein, 48 aa, Homo sapiens
TAGPDQTEMTIEGLQPTVEYVVSVYAQNPSGESQPLVQTAVTNIDRPK

SEQ ID NO: 1789 - protein, 51 aa, Homo sapiens
TAGPDQTEMTIEGLQPTVEYVVSVYAQNPSGESQPLVQTAVTTIPAPTDLK

SEQ ID NO: 1790 - protein, 29 aa, Homo sapiens
TDELPQLVTLPHPNLHGPEILDVPSTVQK

SEQ ID NO: 1791 - protein, 22 aa, Homo sapiens
TEIDKPSQMQVTDVQDNSISVK

SEQ ID NO: 1792 - protein, 22 aa, Homo sapiens
TETITGFQVDAVPANGQTPIQR

SEQ ID NO: 1793 - protein, 10 aa, Homo sapiens
TFYSCTTEGR

SEQ ID NO: 1794 - protein, 27 aa, Homo sapiens
TGLDSPTGIDFSDITANSFTVHWIAPR

SEQ ID NO: 1795 - protein, 39 aa, Homo sapiens
TGQEALSQTTISWAPFQDTSEYIISCHPVGTDEEPLQFR

SEQ ID NO: 1796 - protein, 24 aa, Homo sapiens
TKTETITGFQVDAVPANGQTPIQR

SEQ ID NO: 1797 - protein, 21 aa, Homo sapiens
TNTNVNCPIECFMPLDVQADR

SEQ ID NO: 1798 - protein, 26 aa, Homo sapiens
TNTNVNCPIECFMPLDVQADREDSRE

SEQ ID NO: 1799 - protein, 39 aa, Homo sapiens
TPFVTHPGYDTGNGIQLPGTSGQQPSVGQQMIFEEHGFR

SEQ ID NO: 1800 - protein, 10 aa, Homo sapiens
TYHVGEQWQK

SEQ ID NO: 1801 - protein, 16 aa, Homo sapiens
TYLGNALVCTCYGGSR

SEQ ID NO: 1802 - protein, 15 aa, Homo sapiens
VDVIPVNLPGEHGQR

SEQ ID NO: 1803 - protein, 33 aa, Homo sapiens
VEYELSEEGDEPQYLDLPSTATSVNIPDLLPGR

SEQ ID NO: 1804 - protein, 34 aa, Homo sapiens
VEYELSEEGDEPQYLDLPSTATSVNIPDLLPGRK

SEQ ID NO: 1805 - protein, 15 aa, Homo sapiens
VPGTSTSATLTGLTR

SEQ ID NO: 1806 - protein, 41 aa, Homo sapiens
VREEVVTVGNSVNEGLNQPTDDSCFDPYTVSHYAVGDEWER

SEQ ID NO: 1807 - protein, 14 aa, Homo sapiens
VTDATETTITISWR

SEQ ID NO: 1808 - protein, 16 aa, Homo sapiens
VTIMWTPPESAVTGYR

SEQ ID NO: 1809 - protein, 31 aa, Homo sapiens
VTIMWTPPESAVTGYRVDVIPVNLPGEHGQR

SEQ ID NO: 1810 - protein, 17 aa, Homo sapiens
VTWAPPPSIDLTNFLVR

SEQ ID NO: 1811 - protein, 28 aa, Homo sapiens
VVTPLSPPTNLHLEANPDTGVLTVSWER

SEQ ID NO: 1812 - protein, 13 aa, Homo sapiens
WCGTTQNYDADQK

SEQ ID NO: 1813 - protein, 26 aa, Homo sapiens
WKCDPVDQCQDSETGTFYQIGDSWEK

SEQ ID NO: 1814 - protein, 16 aa, Homo sapiens
WKEATIPGHLNSYTIK

SEQ ID NO: 1815 - protein, 12 aa, Homo sapiens
WLPSSSPVTGYR

SEQ ID NO: 1816 - protein, 12 aa, Homo sapiens
WSRPQAPITGYR

SEQ ID NO: 1817 - protein, 13 aa, Homo sapiens
WTPLNSSTIIGYR

SEQ ID NO: 1818 - protein, 9 aa, Homo sapiens
YEVSVYALK

SEQ ID NO: 1819 - protein, 15 aa, Homo sapiens
YEVSVYALKDTLTSR

SEQ ID NO: 1820 - protein, 45 aa, Homo sapiens
YIVNVYQISEDGEQSLILSTSQTTAPDAPPDTTVDQVDDTSIVVR

SEQ ID NO: 1821 - protein, 8 aa, Homo sapiens
YQCYCYGR

SEQ ID NO: 1822 - protein, 14 aa, Homo sapiens
YSFCTDHTVLVQTR

SEQ ID NO: 1823 - protein, 50 aa, Homo sapiens
YSPVKNEEDVAELSISPSDNAVVLTNLLPGTEYVVSVSSVYEQHESTPLR

SEQ ID NO: 1824 - protein, 20 aa, Homo sapiens
CALEDETYADGAETEVDCNR

SEQ ID NO: 1825 - protein, 21 aa, Homo sapiens
FVEQNETAINITTYPDQENNK

SEQ ID NO: 1826 - protein, 18 aa, Homo sapiens
GLCVDALIELSDENADWK

SEQ ID NO: 1827 - protein, 10 aa, Homo sapiens
GSNYSEILDK

SEQ ID NO: 1828 - protein, 17 aa, Homo sapiens
IIQWLEAEIIPDGWFSK

SEQ ID NO: 1829 - protein, 8 aa, Homo sapiens
LDSSEFLK

SEQ ID NO: 1830 - protein, 8 aa, Homo sapiens
LSFQEFLK

SEQ ID NO: 1831 - protein, 29 aa, Homo sapiens
AAPCPVPSSPGQELCGNNNVTYISSCHMR

SEQ ID NO: 1832 - protein, 22 aa, Homo sapiens
AECCASGNIDTAWSNLTHPGNK

SEQ ID NO: 1833 - protein, 16 aa, Homo sapiens
INLLGFLGLVHCLPCK

SEQ ID NO: 1834 - protein, 18 aa, Homo sapiens
PQSCVVDQTGSAHCVVCR

SEQ ID NO: 1835 - protein, 19 aa, Homo sapiens
ANQSWEDSNTDLVPAPAVR

SEQ ID NO: 1836 - protein, 16 aa, Homo sapiens
ASLEDLGWADWVLSPR

SEQ ID NO: 1837 - protein, 21 aa, Homo sapiens
LRANQSWEDSNTDLVPAPAVR

SEQ ID NO: 1838 - protein, 23 aa, Homo sapiens
ILANVFCLFFFLGTGADPVVSAK

SEQ ID NO: 1839 - protein, 17 aa, Homo sapiens
NAIQAFGNGTDVNVSPK

SEQ ID NO: 1840 - protein, 10 aa, Homo sapiens
CFSLVESTYK

SEQ ID NO: 1841 - protein, 13 aa, Homo sapiens
DPSPVSGPVHLFR

SEQ ID NO: 1842 - protein, 21 aa, Homo sapiens
QWDQVEQDLADELITPQGHEK

SEQ ID NO: 1843 - protein, 10 aa, Homo sapiens
TLFEDAGYLK

SEQ ID NO: 1844 - protein, 26 aa, Homo sapiens
TPEENEPTQLEGGPDSLGFETLENCR

SEQ ID NO: 1845 - protein, 20 aa, Homo sapiens
VVEEPNAFGVNNPFLPQASR

SEQ ID NO: 1846 - protein, 27 aa, Homo sapiens
WNAYSGILGIWHEWEIANNTFTGMWMR

SEQ ID NO: 1847 - protein, 17 aa, Homo sapiens
YEFCPFHNVTQHEQTFR

SEQ ID NO: 1848 - protein, 12 aa, Homo sapiens
AVLVNNITTGER

SEQ ID NO: 1849 - protein, 20 aa, Homo sapiens
DQLVIPDGQEEEQEAAGEGR

SEQ ID NO: 1850 - protein, 9 aa, Homo sapiens
DTINLLDQR

SEQ ID NO: 1851 - protein, 15 aa, Homo sapiens
EETNEIQVVNEEPQR

SEQ ID NO: 1852 - protein, 13 aa, Homo sapiens
FSYDLSQCINQMK

SEQ ID NO: 1853 - protein, 14 aa, Homo sapiens
IQSSHNFQLESVNK

SEQ ID NO: 1854 - protein, 10 aa, Homo sapiens
LQQDVLQFQK

SEQ ID NO: 1855 - protein, 17 aa, Homo sapiens
LQQDVLQFQKNQTNLER

SEQ ID NO: 1856 - protein, 11 aa, Homo sapiens
NIDVFNVEDQK

SEQ ID NO: 1857 - protein, 12 aa, Homo sapiens
NIDVFNVEDQKR

SEQ ID NO: 1858 - protein, 19 aa, Homo sapiens
QVEKEETNEIQVVNEEPQR

SEQ ID NO: 1859 - protein, 11 aa, Homo sapiens
ALEFLQLHNGR

SEQ ID NO: 1860 - protein, 13 aa, Homo sapiens
AQYVLISPEASSR

SEQ ID NO: 1861 - protein, 8 aa, Homo sapiens
DLLGIYEK

SEQ ID NO: 1862 - protein, 26 aa, Homo sapiens
ELLLEHQDAYQAGIVFPDCFYPSICK

SEQ ID NO: 1863 - protein, 9 aa, Homo sapiens
ENYPLPWEK

SEQ ID NO: 1864 - protein, 25 aa, Homo sapiens
FGGVLHLSDLDDDGLDEIIMAAPLR

SEQ ID NO: 1865 - protein, 33 aa, Homo sapiens
FGSALAVLDFNVDGVPDLAVGAPSVGSEQLTYK

SEQ ID NO: 1866 - protein, 9 aa, Homo sapiens
FGSSLITVR

SEQ ID NO: 1867 - protein, 22 aa, Homo sapiens
FHDVSESTHWTPFLNASVHYIR

SEQ ID NO: 1868 - protein, 10 aa, Homo sapiens
GAVYVYFGSK

SEQ ID NO: 1869 - protein, 20 aa, Homo sapiens
GEEDFSWFGYSLHGVTVDNR

SEQ ID NO: 1870 - protein, 15 aa, Homo sapiens
GIVAAFYSGPSLSDK

SEQ ID NO: 1871 - protein, 17 aa, Homo sapiens
GIVAAFYSGPSLSDKEK

SEQ ID NO: 1872 - protein, 19 aa, Homo sapiens
GVFFSVNSWTPDSMSFIYK

SEQ ID NO: 1873 - protein, 17 aa, Homo sapiens
HVSSPLASYFLSFPYAR

SEQ ID NO: 1874 - protein, 15 aa, Homo sapiens
IADVTSGLIGGEDGR

SEQ ID NO: 1875 - protein, 10 aa, Homo sapiens
ILEGFQPSGR

SEQ ID NO: 1876 - protein, 17 aa, Homo sapiens
LGTSLSSGHVLMNGTLK

SEQ ID NO: 1877 - protein, 27 aa, Homo sapiens
LGWAMTSADLNQDGHGDLVVGAPGYSR

SEQ ID NO: 1878 - protein, 11 aa, Homo sapiens
LNVEAANWTVR

SEQ ID NO: 1879 - protein, 13 aa, Homo sapiens
LSGALHVYSLGSD

SEQ ID NO: 1880 - protein, 12 aa, Homo sapiens
NLTTSLTESVDR

SEQ ID NO: 1881 - protein, 9 aa, Homo sapiens
NQVVIAAGR

SEQ ID NO: 1882 - protein, 50 aa, Homo sapiens
QGGMSSSPNITISCQDIYCNLGWTLLAADVNGDSEPDLVIGSPFAPGGGK

SEQ ID NO: 1883 - protein, 15 aa, Homo sapiens
QVLLVGAPTYDDVSK

SEQ ID NO: 1884 - protein, 10 aa, Homo sapiens
SWITPCPEEK

SEQ ID NO: 1885 - protein, 11 aa, Homo sapiens
TLLLVGSPTWK

SEQ ID NO: 1886 - protein, 12 aa, Homo sapiens
TMFIGGSQLSQK

SEQ ID NO: 1887 - protein, 15 aa, Homo sapiens
VAFLTVTLHQGGATR

SEQ ID NO: 1888 - protein, 27 aa, Homo sapiens
VITENVIVDCSHIQFLEMYGEMLAVSK

SEQ ID NO: 1889 - protein, 20 aa, Homo sapiens
VYLIYGNDLGLPPVDLDLDK

SEQ ID NO: 1890 - protein, 24 aa, Homo sapiens
VYLIYGNDLGLPPVDLDLDKEAHR

SEQ ID NO: 1891 - protein, 10 aa, Homo sapiens
CFLGNGTGYR

SEQ ID NO: 1892 - protein, 21 aa, Homo sapiens
CQIAGWGHLDENVSGYSSSLR

SEQ ID NO: 1893 - protein, 24 aa, Homo sapiens
CSSPEVYGADISPNMLCAGYFDCK

SEQ ID NO: 1894 - protein, 10 aa, Homo sapiens
DSALSWEYCR

SEQ ID NO: 1895 - protein, 14 aa, Homo sapiens
DSVSVVLGQHFFNR

SEQ ID NO: 1896 - protein, 11 aa, Homo sapiens
EALVPLVADHK

SEQ ID NO: 1897 - protein, 44 aa, Homo sapiens
GVASTSASGLSCLAWNSDLLYQELHVDSVGAAALLGLGPHAYCR

SEQ ID NO: 1898 - protein, 9 aa, Homo sapiens
LEACESLTR

SEQ ID NO: 1899 - protein, 18 aa, Homo sapiens
NGVAYLYGIISWGDGCGR

SEQ ID NO: 1900 - protein, 14 aa, Homo sapiens
NPDNDERPWCYVVK

SEQ ID NO: 1901 - protein, 16 aa, Homo sapiens
SDACQGDSGGPLACEK

SEQ ID NO: 1902 - protein, 21 aa, Homo sapiens
SQFVQPICLPEPGSTFPAGHK

SEQ ID NO: 1903 - protein, 12 aa, Homo sapiens
TTDVTQTFGIEK

SEQ ID NO: 1904 - protein, 11 aa, Homo sapiens
VANYVDWINDR

SEQ ID NO: 1905 - protein, 19 aa, Homo sapiens
VQLSPDLLATLPEPASPGR

SEQ ID NO: 1906 - protein, 9 aa, Homo sapiens
YEYLEGGDR

SEQ ID NO: 1907 - protein, 21 aa, Homo sapiens
YIPYTLYSVFNPSDHDLVLIR

SEQ ID NO: 1908 - protein, 14 aa, Homo sapiens
APWVEQEGPEYWDR

SEQ ID NO: 1909 - protein, 26 aa, Homo sapiens
GYYNQSEAGSHTLQWMYGCDLGPDGR

SEQ ID NO: 1910 - protein, 17 aa, Homo sapiens
YTCHVQHEGLPEPLTLR

SEQ ID NO: 1911 - protein, 31 aa, Homo sapiens
AVGDKLPECEADDGCPKPPEIAHGYVEHSVR

SEQ ID NO: 1912 - protein, 7 aa, Homo sapiens
DYAEVGR

SEQ ID NO: 1913 - protein, 6 aa, Homo sapiens
FTDHLK

SEQ ID NO: 1914 - protein, 20 aa, Homo sapiens
FTDHLKYVMLPVADQDQCIR

SEQ ID NO: 1915 - protein, 10 aa, Homo sapiens
HYEGSTVPEK

SEQ ID NO: 1916 - protein, 11 aa, Homo sapiens
HYEGSTVPEKK

SEQ ID NO: 1917 - protein, 24 aa, Homo sapiens
KQLVEIEKVVLHPNYSQVDIGLIK

SEQ ID NO: 1918 - protein, 24 aa, Homo sapiens
KTPKSPVGVQPILNEHTFCAGMSK

SEQ ID NO: 1919 - protein, 26 aa, Homo sapiens
LPECEADDGCPKPPEIAHGYVEHSVR

SEQ ID NO: 1920 - protein, 15 aa, Homo sapiens
LRTEGDGVYTLNNEK

SEQ ID NO: 1921 - protein, 20 aa, Homo sapiens
LRTEGDGVYTLNNEKQWINK

SEQ ID NO: 1922 - protein, 23 aa, Homo sapiens
QLVEIEKVVLHPNYSQVDIGLIK

SEQ ID NO: 1923 - protein, 22 aa, Homo sapiens
SCAVAEYGVYVKVTSIQDWVQK

SEQ ID NO: 1924 - protein, 20 aa, Homo sapiens
SPVGVQPILNEHTFCAGMSK

SEQ ID NO: 1925 - protein, 54 aa, Homo sapiens
SPVGVQPILNEHTFCAGMSKYQEDTCYGDAGSAFAVHDLEEDTWYATGILSFDK

SEQ ID NO: 1926 - protein, 13 aa, Homo sapiens
TEGDGVYTLNNEK

SEQ ID NO: 1927 - protein, 18 aa, Homo sapiens
TEGDGVYTLNNEKQWINK

SEQ ID NO: 1928 - protein, 23 aa, Homo sapiens
TPKSPVGVQPILNEHTFCAGMSK

SEQ ID NO: 1929 - protein, 9 aa, Homo sapiens
VGYVSGWGR

SEQ ID NO: 1930 - protein, 14 aa, Homo sapiens
VGYVSGWGRNANFK

SEQ ID NO: 1931 - protein, 16 aa, Homo sapiens
VMPICLPSKDYAEVGR

SEQ ID NO: 1932 - protein, 10 aa, Homo sapiens
VTSIQDWVQK

SEQ ID NO: 1933 - protein, 15 aa, Homo sapiens
VTSIQDWVQKTIAEN

SEQ ID NO: 1934 - protein, 16 aa, Homo sapiens
VVLHPNYSQVDIGLIK

SEQ ID NO: 1935 - protein, 18 aa, Homo sapiens
VVLHPNYSQVDIGLIKLK

SEQ ID NO: 1936 - protein, 34 aa, Homo sapiens
YQEDTCYGDAGSAFAVHDLEEDTWYATGILSFDK

SEQ ID NO: 1937 - protein, 46 aa, Homo sapiens
YQEDTCYGDAGSAFAVHDLEEDTWYATGILSFDKSCAVAEYGVYVK

SEQ ID NO: 1938 - protein, 14 aa, Homo sapiens
YVMLPVADQDQCIR

SEQ ID NO: 1939 - protein, 24 aa, Homo sapiens
YVMLPVADQDQCIRHYEGSTVPEK

SEQ ID NO: 1940 - protein, 25 aa, Homo sapiens
YVMLPVADQDQCIRHYEGSTVPEKK

SEQ ID NO: 1941 - protein, 15 aa, Homo sapiens
AVGDKLPECEAVCGK

SEQ ID NO: 1942 - protein, 17 aa, Homo sapiens
AVGDKLPECEAVCGKPK

SEQ ID NO: 1943 - protein, 12 aa, Homo sapiens
DIAPTLTLYVGK

SEQ ID NO: 1944 - protein, 13 aa, Homo sapiens
DIAPTLTLYVGKK

SEQ ID NO: 1945 - protein, 20 aa, Homo sapiens
DIAPTLTLYVGKKQLVEIEK

SEQ ID NO: 1946 - protein, 8 aa, Homo sapiens
GSFPWQAK

SEQ ID NO: 1947 - protein, 32 aa, Homo sapiens
GSFPWQAKMVSHHNLTTGATLINEQWLLTTAK

SEQ ID NO: 1948 - protein, 9 aa, Homo sapiens
ILGGHLDAK

SEQ ID NO: 1949 - protein, 17 aa, Homo sapiens
ILGGHLDAKGSFPWQAK

SEQ ID NO: 1950 - protein, 8 aa, Homo sapiens
KQLVEIEK

SEQ ID NO: 1951 - protein, 10 aa, Homo sapiens
LPECEAVCGK

SEQ ID NO: 1952 - protein, 14 aa, Homo sapiens
LRTEGDGVYTLNDK

SEQ ID NO: 1953 - protein, 24 aa, Homo sapiens
MVSHHNLTTGATLINEQWLLTTAK

SEQ ID NO: 1954 - protein, 37 aa, Homo sapiens
MVSHHNLTTGATLINEQWLLTTAKNLFLNHSENATAK

SEQ ID NO: 1955 - protein, 13 aa, Homo sapiens
NLFLNHSENATAK

SEQ ID NO: 1956 - protein, 25 aa, Homo sapiens
NLFLNHSENATAKDIAPTLTLYVGK

SEQ ID NO: 1957 - protein, 26 aa, Homo sapiens
NLFLNHSENATAKDIAPTLTLYVGKK

SEQ ID NO: 1958 - protein, 7 aa, Homo sapiens
QLVEIEK

SEQ ID NO: 1959 - protein, 12 aa, Homo sapiens
SCAVAEYGVYVK

SEQ ID NO: 1960 - protein, 12 aa, Homo sapiens
TEGDGVYTLNDK

SEQ ID NO: 1961 - protein, 13 aa, Homo sapiens
TEGDGVYTLNDKK

SEQ ID NO: 1962 - protein, 9 aa, Homo sapiens
VMPICLPSK

SEQ ID NO: 1963 - protein, 17 aa, Homo sapiens
FPKPPEIANGYVEHLFR

SEQ ID NO: 1964 - protein, 15 aa, Homo sapiens
MSDLGAVISLLLWGR

SEQ ID NO: 1965 - protein, 18 aa, Homo sapiens
QLFALYSGNDVTDISDDR

SEQ ID NO: 1966 - protein, 35 aa, Homo sapiens
QLFALYSGNDVTDISDDRFPKPPEIANGYVEHLFR

SEQ ID NO: 1967 - protein, 14 aa, Homo sapiens
SDLGAVISLLLWGR

SEQ ID NO: 1968 - protein, 20 aa, Homo sapiens
SPVGVQPILNEHTFCVGMSK

SEQ ID NO: 1969 - protein, 14 aa, Homo sapiens
VGYVSGWGQSDNFK

SEQ ID NO: 1970 - protein, 16 aa, Homo sapiens
VMPICLPSKNYAEVGR

SEQ ID NO: 1971 - protein, 10 aa, Homo sapiens
VTSIQHWVQK

SEQ ID NO: 1972 - protein, 16 aa, Homo sapiens
VVLHPNYHQVDIGLIK

SEQ ID NO: 1973 - protein, 34 aa, Homo sapiens
YQEDTCYGDAGSAFAVHDLEEDTWYAAGILSFDK

SEQ ID NO: 1974 - protein, 23 aa, Homo sapiens
YVMLPVADQYDCITHYEGSTCPK

SEQ ID NO: 1975 - protein, 19 aa, Homo sapiens
ADIFINGSQLGEDFIQLHK

SEQ ID NO: 1976 - protein, 18 aa, Homo sapiens
EDFLNPDVLDIFISSVQK

SEQ ID NO: 1977 - protein, 16 aa, Homo sapiens
EGDLTLYAINLHNVTK

SEQ ID NO: 1978 - protein, 17 aa, Homo sapiens
GYNISWELGNEPNSFLK

SEQ ID NO: 1979 - protein, 20 aa, Homo sapiens
KADIFINGSQLGEDFIQLHK

SEQ ID NO: 1980 - protein, 21 aa, Homo sapiens
TADLQWNSSNAQLLLDYCSSK

SEQ ID NO: 1981 - protein, 16 aa, Homo sapiens
ADLFYDVEALDLESPK

SEQ ID NO: 1982 - protein, 7 aa, Homo sapiens
ALDLINK

SEQ ID NO: 1983 - protein, 9 aa, Homo sapiens
DGYLFQLLR

SEQ ID NO: 1984 - protein, 20 aa, Homo sapiens
DHHHPHKPHEHGPPPPPDER

SEQ ID NO: 1985 - protein, 35 aa, Homo sapiens
DHSHGPPLPQGPPPLLPMSCSSCQHATFGTNGAQR

SEQ ID NO: 1986 - protein, 14 aa, Homo sapiens
DSPVLIDFFEDTER

SEQ ID NO: 1987 - protein, 10 aa, Homo sapiens
EENDDFASFR

SEQ ID NO: 1988 - protein, 20 aa, Homo sapiens
GEVLPLPEANFPSFPLPHHK

SEQ ID NO: 1989 - protein, 14 aa, Homo sapiens
GGEGTGYFVDFSVR

SEQ ID NO: 1990 - protein, 21 aa, Homo sapiens
HPLKPDNQPFPQSVSESCPGK

SEQ ID NO: 1991 - protein, 9 aa, Homo sapiens
HPNVFGFCR

SEQ ID NO: 1992 - protein, 9 aa, Homo sapiens
HSHESQDLR

SEQ ID NO: 1993 - protein, 14 aa, Homo sapiens
HSHNNNSSDLHPHK

SEQ ID NO: 1994 - protein, 31 aa, Homo sapiens
IADAHLDRVENTTVYYLVLDVQESDCSVLSR

SEQ ID NO: 1995 - protein, 32 aa, Homo sapiens
IADAHLDRVENTTVYYLVLDVQESDCSVLSRK

SEQ ID NO: 1996 - protein, 21 aa, Homo sapiens
KGEVLPLPEANFPSFPLPHHK

SEQ ID NO: 1997 - protein, 12 aa, Homo sapiens
KYWNDCEPPDSR

SEQ ID NO: 1998 - protein, 35 aa, Homo sapiens
NLVINCEVFDPQEHENINGVPPHLGHPFHWGGHER

SEQ ID NO: 1999 - protein, 10 aa, Homo sapiens
PSEIVIGQCK

SEQ ID NO: 2000 - protein, 7 aa, Homo sapiens
QIGSVYR

SEQ ID NO: 2001 - protein, 10 aa, Homo sapiens
RDGYLFQLLR

SEQ ID NO: 2002 - protein, 11 aa, Homo sapiens
RPSEIVIGQCK

SEQ ID NO: 2003 - protein, 16 aa, Homo sapiens
SGFPQVSMFFTHTFPK

SEQ ID NO: 2004 - protein, 23 aa, Homo sapiens
VENTTVYYLVLDVQESDCSVLSR

SEQ ID NO: 2005 - protein, 19 aa, Homo sapiens
VIDFNCTTSSVSSALANTK

SEQ ID NO: 2006 - protein, 33 aa, Homo sapiens
VIDFNCTTSSVSSALANTKDSPVLIDFFEDTER

SEQ ID NO: 2007 - protein, 35 aa, Homo sapiens
VIDFNCTTSSVSSALANTKDSPVLIDFFEDTERYR

SEQ ID NO: 2008 - protein, 12 aa, Homo sapiens
YKEENDDFASFR

SEQ ID NO: 2009 - protein, 11 aa, Homo sapiens
YWNDCEPPDSR

SEQ ID NO: 2010 - protein, 13 aa, Homo sapiens
EEASDYLELDTIK

SEQ ID NO: 2011 - protein, 16 aa, Homo sapiens
EEEAIQLDGLNASQIR

SEQ ID NO: 2012 - protein, 9 aa, Homo sapiens
FAFQAEVNR

SEQ ID NO: 2013 - protein, 19 aa, Homo sapiens
FQSSHHPTDITSLDQYVER

SEQ ID NO: 2014 - protein, 14 aa, Homo sapiens
GVVDSDDLPLNVSR

SEQ ID NO: 2015 - protein, 25 aa, Homo sapiens
GYEVIYLTEPVDEYCIQALPEFDGK

SEQ ID NO: 2016 - protein, 23 aa, Homo sapiens
HNNDTQHIWESDSNEFSVIADPR

SEQ ID NO: 2017 - protein, 24 aa, Homo sapiens
IKEDEDDKTVLDLAVVLFETATLR

SEQ ID NO: 2018 - protein, 8 aa, Homo sapiens
LIINSLYK

SEQ ID NO: 2019 - protein, 19 aa, Homo sapiens
LISLTDENALSGNEELTVK

SEQ ID NO: 2020 - protein, 21 aa, Homo sapiens
LTESPCALVASQYGWSGNMER

SEQ ID NO: 2021 - protein, 14 aa, Homo sapiens
NLLHVTDTGVGMTR

SEQ ID NO: 2022 - protein, 11 aa, Homo sapiens
SILFVPTSAPR

SEQ ID NO: 2023 - protein, 24 aa, Homo sapiens
TDDEVVQREEEAIQLDGLNASQIR

SEQ ID NO: 2024 - protein, 34 aa, Homo sapiens
TETVEEPMEEEEAAKEEKEESDDEAAVEEEEEEK

SEQ ID NO: 2025 - protein, 13 aa, Homo sapiens
VFITDDFHDMMPK

SEQ ID NO: 2026 - protein, 15 aa, Homo sapiens
YSQFINFPIYVWSSK

SEQ ID NO: 2027 - protein, 12 aa, Homo sapiens
ELISNASDALDK

SEQ ID NO: 2028 - protein, 12 aa, Homo sapiens
DAGTIAGLNVMR

SEQ ID NO: 2029 - protein, 18 aa, Homo sapiens
DNHLLGTFDLTGIPPAPR

SEQ ID NO: 2030 - protein, 12 aa, Homo sapiens
ELEEIVQPIISK

SEQ ID NO: 2031 - protein, 10 aa, Homo sapiens
FEELNMDLFR

SEQ ID NO: 2032 - protein, 49 aa, Homo sapiens
GINPDEAVAYGAAVQAGVLSGDQDTGDLVLLDVCPLTLGIETVGGVMTK

SEQ ID NO: 2033 - protein, 18 aa, Homo sapiens
IEIESFYEGEDFSETLTR

SEQ ID NO: 2034 - protein, 16 aa, Homo sapiens
IEWLESHQDADIEDFK

SEQ ID NO: 2035 - protein, 17 aa, Homo sapiens
IINEPTAAAIAYGLDKR

SEQ ID NO: 2036 - protein, 14 aa, Homo sapiens
ITPSYVAFTPEGER

SEQ ID NO: 2037 - protein, 11 aa, Homo sapiens
NELESYAYSLK

SEQ ID NO: 2038 - protein, 43 aa, Homo sapiens
NILVFDLGGGTFDVSLLTIDNGVFEVVATNGDTHLGGEDFDQR

SEQ ID NO: 2039 - protein, 15 aa, Homo sapiens
NQLTSNPENTVFDAK

SEQ ID NO: 2040 - protein, 14 aa, Homo sapiens
SDIDEIVLVGGSTR

SEQ ID NO: 2041 - protein, 17 aa, Homo sapiens
SQIFSTASDNQPTVTIK

SEQ ID NO: 2042 - protein, 14 aa, Homo sapiens
TFAPEEISAMVLTK

SEQ ID NO: 2043 - protein, 23 aa, Homo sapiens
VLEDSDLKKSDIDEIVLVGGSTR

SEQ ID NO: 2044 - protein, 16 aa, Homo sapiens
IINEPTAAAIAYGLDK

SEQ ID NO: 2045 - protein, 15 aa, Homo sapiens
AANSLEAFIFETQDK

SEQ ID NO: 2046 - protein, 15 aa, Homo sapiens
AEPPLNASASDQGEK

SEQ ID NO: 2047 - protein, 13 aa, Homo sapiens
DAVVYPILVEFTR

SEQ ID NO: 2048 - protein, 10 aa, Homo sapiens
DEPGEQVELK

SEQ ID NO: 2049 - protein, 19 aa, Homo sapiens
EEAEAPVEDGSQPPPPEPK

SEQ ID NO: 2050 - protein, 19 aa, Homo sapiens
ENGTDTVQEEEESPAEGSK

SEQ ID NO: 2051 - protein, 8 aa, Homo sapiens
EVQYLLNK

SEQ ID NO: 2052 - protein, 12 aa, Homo sapiens
FPEHELTFDPQR

SEQ ID NO: 2053 - protein, 18 aa, Homo sapiens
LGNTISSLFGGGTTPDAK

SEQ ID NO: 2054 - protein, 37 aa, Homo sapiens
LGNTISSLFGGGTTPDAKENGTDTVQEEEESPAEGSK

SEQ ID NO: 2055 - protein, 19 aa, Homo sapiens
LIPEMDQIFTEVEMTTLEK

SEQ ID NO: 2056 - protein, 7 aa, Homo sapiens
LQDLTLR

SEQ ID NO: 2057 - protein, 21 aa, Homo sapiens
LSAASTWLEDEGVGATTVMLK

SEQ ID NO: 2058 - protein, 16 aa, Homo sapiens
LSALDNLLNHSSMFLK

SEQ ID NO: 2059 - protein, 15 aa, Homo sapiens
LYQPEYQEVSTEEQR

SEQ ID NO: 2060 - protein, 21 aa, Homo sapiens
LYQPEYQEVSTEEQREEISGK

SEQ ID NO: 2061 - protein, 21 aa, Homo sapiens
MVEEIGVELVVLDLPDLPEDK

SEQ ID NO: 2062 - protein, 12 aa, Homo sapiens
SLAEDFAEQPIK

SEQ ID NO: 2063 - protein, 16 aa, Homo sapiens
VAIVKPGVPMEIVLNK

SEQ ID NO: 2064 - protein, 13 aa, Homo sapiens
VEFEELCADLFER

SEQ ID NO: 2065 - protein, 11 aa, Homo sapiens
VFGSQNLTTVK

SEQ ID NO: 2066 - protein, 9 aa, Homo sapiens
VINETWAWK

SEQ ID NO: 2067 - protein, 18 aa, Homo sapiens
VINETWAWKNATLAEQAK

SEQ ID NO: 2068 - protein, 19 aa, Homo sapiens
VIPPAGQTEDAEPISEPEK

SEQ ID NO: 2069 - protein, 19 aa, Homo sapiens
VLQLINDNTATALSYGVFR

SEQ ID NO: 2070 - protein, 30 aa, Homo sapiens
VPGPVQQALQSAEMSLDEIEQVILVGGATR

SEQ ID NO: 2071 - protein, 9 aa, Homo sapiens
ANLTVVLLR

SEQ ID NO: 2072 - protein, 14 aa, Homo sapiens
ASVSVTAEDEGTQR

SEQ ID NO: 2073 - protein, 29 aa, Homo sapiens
DCPGNWTWPENSQQTPMCQAWGNPLPELK

SEQ ID NO: 2074 - protein, 16 aa, Homo sapiens
DGTFPLPIGESVTVTR

SEQ ID NO: 2075 - protein, 16 aa, Homo sapiens
DHHGANFSCRTELDLR

SEQ ID NO: 2076 - protein, 9 aa, Homo sapiens
DLEGTYLCR

SEQ ID NO: 2077 - protein, 17 aa, Homo sapiens
EPAVGEPAEVTTTVLVR

SEQ ID NO: 2078 - protein, 16 aa, Homo sapiens
GGSVLVTCSTSCDQPK

SEQ ID NO: 2079 - protein, 28 aa, Homo sapiens
KVYELSNVQEDSQPMCYSNCPDGQSTAK

SEQ ID NO: 2080 - protein, 10 aa, Homo sapiens
LLGIETPLPK

SEQ ID NO: 2081 - protein, 15 aa, Homo sapiens
LNPTVTYGNDSFSAK

SEQ ID NO: 2082 - protein, 18 aa, Homo sapiens
REPAVGEPAEVTTTVLVR

SEQ ID NO: 2083 - protein, 17 aa, Homo sapiens
SFSCSATLEVAGQLIHK

SEQ ID NO: 2084 - protein, 21 aa, Homo sapiens
SFSCSATLEVAGQLIHKNQTR

SEQ ID NO: 2085 - protein, 38 aa, Homo sapiens
TELDLRPQGLELFENTSAPYQLQTFVLPATPPQLVSPR

SEQ ID NO: 2086 - protein, 11 aa, Homo sapiens
TFLTVYWTPER

SEQ ID NO: 2087 - protein, 14 aa, Homo sapiens
VELAPLPSWQPVGK

SEQ ID NO: 2088 - protein, 14 aa, Homo sapiens
VTLNGVPAQPLGPR

SEQ ID NO: 2089 - protein, 27 aa, Homo sapiens
VYELSNVQEDSQPMCYSNCPDGQSTAK

SEQ ID NO: 2090 - protein, 18 aa, Homo sapiens
AMVGSDVELSCACPEGSR

SEQ ID NO: 2091 - protein, 16 aa, Homo sapiens
FDLNDVYVYWQTSESK

SEQ ID NO: 2092 - protein, 10 aa, Homo sapiens
GLYDVVSVLR

SEQ ID NO: 2093 - protein, 11 aa, Homo sapiens
LFNVTPQDEQK

SEQ ID NO: 2094 - protein, 8 aa, Homo sapiens
PNVYWINK

SEQ ID NO: 2095 - protein, 20 aa, Homo sapiens
TDNSLLDQALQNDTVFLNMR

SEQ ID NO: 2096 - protein, 32 aa, Homo sapiens
TPSVNIGCCIENVLLQQNLTVGSQTGNDIGER

SEQ ID NO: 2097 - protein, 19 aa, Homo sapiens
TVVTYHIPQNSSLENVDSR

SEQ ID NO: 2098 - protein, 10 aa, Homo sapiens
AFWLDVSHNR

SEQ ID NO: 2099 - protein, 21 aa, Homo sapiens
AGAFLGLTNVAVMNLSGNCLR

SEQ ID NO: 2100 - protein, 15 aa, Homo sapiens
ALRDFALQNPSAVPR

SEQ ID NO: 2101 - protein, 9 aa, Homo sapiens
ANVFVQLPR

SEQ ID NO: 2102 - protein, 12 aa, Homo sapiens
DFALQNPSAVPR

SEQ ID NO: 2103 - protein, 14 aa, Homo sapiens
DLHFLEELQLGHNR

SEQ ID NO: 2104 - protein, 10 aa, Homo sapiens
DLSEAHFAPC

SEQ ID NO: 2105 - protein, 34 aa, Homo sapiens
DNGLVGIEEQSLWGLAELLELDLTSNQLTHLPHR

SEQ ID NO: 2106 - protein, 8 aa, Homo sapiens
ELVLAGNR

SEQ ID NO: 2107 - protein, 35 aa, Homo sapiens
FVQAICEGDDCQPPAYTYNNITCASPPEVVGLDLR

SEQ ID NO: 2108 - protein, 13 aa, Homo sapiens
IRPHTFTGLSGLR

SEQ ID NO: 2109 - protein, 14 aa, Homo sapiens
LAELPADALGPLQR

SEQ ID NO: 2110 - protein, 16 aa, Homo sapiens
LAYLQPALFSGLAELR

SEQ ID NO: 2111 - protein, 14 aa, Homo sapiens
LEALPNSLLAPLGR

SEQ ID NO: 2112 - protein, 31 aa, Homo sapiens
LEDGLFEGLGSLWDLNLGWNSLAVLPDAAFR

SEQ ID NO: 2113 - protein, 8 aa, Homo sapiens
LEYLLLSR

SEQ ID NO: 2114 - protein, 7 aa, Homo sapiens
LFQGLGK

SEQ ID NO: 2115 - protein, 13 aa, Homo sapiens
LHSLHLEGSCLGR

SEQ ID NO: 2116 - protein, 10 aa, Homo sapiens
LSHNAIASLR

SEQ ID NO: 2117 - protein, 15 aa, Homo sapiens
LWLEGNPWDCGCPLK

SEQ ID NO: 2118 - protein, 15 aa, Homo sapiens
NLIAAVAPGAFLGLK

SEQ ID NO: 2119 - protein, 8 aa, Homo sapiens
NLPEQVFR

SEQ ID NO: 2120 - protein, 22 aa, Homo sapiens
SFEGLGQLEVLTLDHNQLQEVK

SEQ ID NO: 2121 - protein, 22 aa, Homo sapiens
SLALGTFAHTPALASLGLSNNR

SEQ ID NO: 2122 - protein, 11 aa, Homo sapiens
TFTPQPPGLER

SEQ ID NO: 2123 - protein, 16 aa, Homo sapiens
VAGLLEDTFPGLLGLR

SEQ ID NO: 2124 - protein, 8 aa, Homo sapiens
WLDLSHNR

SEQ ID NO: 2125 - protein, 23 aa, Homo sapiens
CYPHPGSELPLQALVMGEGTCEK

SEQ ID NO: 2126 - protein, 16 aa, Homo sapiens
GPLEHLYSLHIPNCDK

SEQ ID NO: 2127 - protein, 23 aa, Homo sapiens
LAACGPPPVAPPAAVAAVAGGAR

SEQ ID NO: 2128 - protein, 12 aa, Homo sapiens
LEGEACGVYTPR

SEQ ID NO: 2129 - protein, 9 aa, Homo sapiens
LIQGAPTIR

SEQ ID NO: 2130 - protein, 13 aa, Homo sapiens
TPCQQELDQVLER

SEQ ID NO: 2131 - protein, 17 aa, Homo sapiens
ALAQCAPPPAVCAELVR

SEQ ID NO: 2132 - protein, 20 aa, Homo sapiens
AYLLPAPPAPGNASESEEDR

SEQ ID NO: 2133 - protein, 18 aa, Homo sapiens
CQPSPDEARPLQALLDGR

SEQ ID NO: 2134 - protein, 24 aa, Homo sapiens
EPGCGCCLTCALSEGQPCGIYTER

SEQ ID NO: 2135 - protein, 8 aa, Homo sapiens
FLNVLSPR

SEQ ID NO: 2136 - protein, 8 aa, Homo sapiens
GFCWCVDK

SEQ ID NO: 2137 - protein, 11 aa, Homo sapiens
GLCVNASAVSR

SEQ ID NO: 2138 - protein, 9 aa, Homo sapiens
PLQALLDGR

SEQ ID NO: 2139 - protein, 18 aa, Homo sapiens
VDYESQSTDTQNFSSESK

SEQ ID NO: 2140 - protein, 11 aa, Homo sapiens
YGQPLPGYTTK

SEQ ID NO: 2141 - protein, 20 aa, Homo sapiens
YKVDYESQSTDTQNFSSESK

SEQ ID NO: 2142 - protein, 17 aa, Homo sapiens
AGAAAGGPGVSGVCVCK

SEQ ID NO: 2143 - protein, 22 aa, Homo sapiens
EDAGEYECHASNSQGQASASAK

SEQ ID NO: 2144 - protein, 14 aa, Homo sapiens
GTCEQGPSIVTPPK

SEQ ID NO: 2145 - protein, 14 aa, Homo sapiens
HEVTGWVLVSPLSK

SEQ ID NO: 2146 - protein, 13 aa, Homo sapiens
ITVVDALHEIPVK

SEQ ID NO: 2147 - protein, 18 aa, Homo sapiens
YPVCGSDGTTYPSGCQLR

SEQ ID NO: 2148 - protein, 7 aa, Homo sapiens
ALEWLAR

SEQ ID NO: 2149 - protein, 19 aa, Homo sapiens
ATHTLTLTCTFSGLSVNTR

SEQ ID NO: 2150 - protein, 8 aa, Homo sapiens
ESGPALVK

SEQ ID NO: 2151 - protein, 22 aa, Homo sapiens
EVMITSNAFDIWGQGTWSPSLQ

SEQ ID NO: 2152 - protein, 7 aa, Homo sapiens
IDWDDDK

SEQ ID NO: 2153 - protein, 12 aa, Homo sapiens
QPPGKALEWLAR

SEQ ID NO: 2154 - protein, 16 aa, Homo sapiens
LLIYDASNLETGVPSR

SEQ ID NO: 2155 - protein, 13 aa, Homo sapiens
ELTPNYNPDIIFK

SEQ ID NO: 2156 - protein, 21 aa, Homo sapiens
LALTPAHLLFTADNHTEPAAR

SEQ ID NO: 2157 - protein, 18 aa, Homo sapiens
LLLEEGSFHPLGMSGAGS

SEQ ID NO: 2158 - protein, 21 aa, Homo sapiens
VLAMGEDGSPTFSDVLIFLDR

SEQ ID NO: 2159 - protein, 29 aa, Homo sapiens
ALVLEQLTPALHSTNFSCVLVDPEQVVQR

SEQ ID NO: 2160 - protein, 14 aa, Homo sapiens
DPCPSQPPVFPAAK

SEQ ID NO: 2161 - protein, 22 aa, Homo sapiens
FPNFSILYWLGNGSFIEHLPGR

SEQ ID NO: 2162 - protein, 12 aa, Homo sapiens
HVVLAQLWAGLR

SEQ ID NO: 2163 - protein, 29 aa, Homo sapiens
QCPALEVTWPEVEVPLNGTLSLSCVACSR

SEQ ID NO: 2164 - protein, 16 aa, Homo sapiens
CVLTFAHEGQQYNITR

SEQ ID NO: 2165 - protein, 12 aa, Homo sapiens
EETIPVIISPLK

SEQ ID NO: 2166 - protein, 19 aa, Homo sapiens
GTTHLLVHDVALEDAGYYR

SEQ ID NO: 2167 - protein, 9 aa, Homo sapiens
LEGEPVALR

SEQ ID NO: 2168 - protein, 26 aa, Homo sapiens
MWAQDGALWLLPALQEDSGTYVCTTR

SEQ ID NO: 2169 - protein, 22 aa, Homo sapiens
QEYSENNENYIEVPLIFDPVTR

SEQ ID NO: 2170 - protein, 30 aa, Homo sapiens
VFLGTGTPLTTMLWWTANDTHIESAYPGGR

SEQ ID NO: 2171 - protein, 9 aa, Homo sapiens
CPLFEHFLK

SEQ ID NO: 2172 - protein, 9 aa, Homo sapiens
DLEEPINFR

SEQ ID NO: 2173 - protein, 6 aa, Homo sapiens
DVLWFR

SEQ ID NO: 2174 - protein, 21 aa, Homo sapiens
DVLWFRPTLLNDTGNYTCMLR

SEQ ID NO: 2175 - protein, 23 aa, Homo sapiens
EKDVLWFRPTLLNDTGNYTCMLR

SEQ ID NO: 2176 - protein, 19 aa, Homo sapiens
FNYSTAHSAGLTLIWYWTR

SEQ ID NO: 2177 - protein, 38 aa, Homo sapiens
IQNFNNVIPEGMNLSFLIALISNNGNYTCVVTYPENGR

SEQ ID NO: 2178 - protein, 26 aa, Homo sapiens
ITCPNVDGYFPSSVKPTITWYMGCYK

SEQ ID NO: 2179 - protein, 19 aa, Homo sapiens
KPDDITIDVTINESISHSR

SEQ ID NO: 2180 - protein, 9 aa, Homo sapiens
LYIEYGIQR

SEQ ID NO: 2181 - protein, 18 aa, Homo sapiens
NAVPPVIHSPNDHVVYEK

SEQ ID NO: 2182 - protein, 10 aa, Homo sapiens
NEVWWTIDGK

SEQ ID NO: 2183 - protein, 15 aa, Homo sapiens
PTLLNDTGNYTCMLR

SEQ ID NO: 2184 - protein, 12 aa, Homo sapiens
QDRDLEEPINFR

SEQ ID NO: 2185 - protein, 11 aa, Homo sapiens
QIQVFEDEPAR

SEQ ID NO: 2186 - protein, 14 aa, Homo sapiens
SSSDEQGLSYSSLK

SEQ ID NO: 2187 - protein, 7 aa, Homo sapiens
TQILSIK

SEQ ID NO: 2188 - protein, 10 aa, Homo sapiens
VAFPLEVVQK

SEQ ID NO: 2189 - protein, 20 aa, Homo sapiens
DEQGFSLFPVIGAPAQNEIK

SEQ ID NO: 2190 - protein, 19 aa, Homo sapiens
EEDLLLQYDCLALNLHGLR

SEQ ID NO: 2191 - protein, 16 aa, Homo sapiens
FIHNENGANYSVTATR

SEQ ID NO: 2192 - protein, 17 aa, Homo sapiens
FLPAAVADSGIYTCIVR

SEQ ID NO: 2193 - protein, 16 aa, Homo sapiens
GTQFLAAVLWQLNGTK

SEQ ID NO: 2194 - protein, 24 aa, Homo sapiens
IADVKEEDLLLQYDCLALNLHGLR

SEQ ID NO: 2195 - protein, 23 aa, Homo sapiens
IQQEEGQNQSFSNGLACLDMVLR

SEQ ID NO: 2196 - protein, 19 aa, Homo sapiens
IYCPTIDLYNWTAPLEWFK

SEQ ID NO: 2197 - protein, 12 aa, Homo sapiens
NANLTCSACFGK

SEQ ID NO: 2198 - protein, 14 aa, Homo sapiens
PSYTVDWYYSQTNK

SEQ ID NO: 2199 - protein, 17 aa, Homo sapiens
QGKPSYTVDWYYSQTNK

SEQ ID NO: 2200 - protein, 20 aa, Homo sapiens
QSDCNVPDYLMYSTVSGSEK

SEQ ID NO: 2201 - protein, 13 aa, Homo sapiens
QSWGLENEALIVR

SEQ ID NO: 2202 - protein, 10 aa, Homo sapiens
TGYANVTIYK

SEQ ID NO: 2203 - protein, 9 aa, Homo sapiens
VFASGQLLK

SEQ ID NO: 2204 - protein, 15 aa, Homo sapiens
LQLEAVNITDLSENR

SEQ ID NO: 2205 - protein, 16 aa, Homo sapiens
LQLEAVNITDLSENRK

SEQ ID NO: 2206 - protein, 19 aa, Homo sapiens
NNQLVAGYLQGPNVNLEEK

SEQ ID NO: 2207 - protein, 43 aa, Homo sapiens
SDSGPTTSFESAACPGWFLCTAMEADQPVSLTNMPDEGVMVTK

SEQ ID NO: 2208 - protein, 12 aa, Homo sapiens
AAISGENAGLVR

SEQ ID NO: 2209 - protein, 24 aa, Homo sapiens
ADVQAHGEGQEFSITCLVDEEEMK

SEQ ID NO: 2210 - protein, 25 aa, Homo sapiens
ADVQAHGEGQEFSITCLVDEEEMKK

SEQ ID NO: 2211 - protein, 26 aa, Homo sapiens
ANLSSQALQMSLDYGFVTPLTSMSIR

SEQ ID NO: 2212 - protein, 27 aa, Homo sapiens
DKICDLLVANNHFAHFFAPQNLTNMNK

SEQ ID NO: 2213 - protein, 34 aa, Homo sapiens
DPWHGAEVSCWFIHNNGAGLIDGAYTDYIVPDIF

SEQ ID NO: 2214 - protein, 36 aa, Homo sapiens
EDTLCFNINEEPGVILSLVQDPNTGFSVNGQLIGNK

SEQ ID NO: 2215 - protein, 29 aa, Homo sapiens
EERANLSSQALQMSLDYGFVTPLTSMSIR

SEQ ID NO: 2216 - protein, 8 aa, Homo sapiens
ELAAQTIK

SEQ ID NO: 2217 - protein, 14 aa, Homo sapiens
EQFTIHLTVNPQSK

SEQ ID NO: 2218 - protein, 10 aa, Homo sapiens
EVAFDLEIPK

SEQ ID NO: 2219 - protein, 18 aa, Homo sapiens
FAHYVVTSQVVNTANEAR

SEQ ID NO: 2220 - protein, 27 aa, Homo sapiens
FPLYNLGFGHNVDFNFLEVMSMENNGR

SEQ ID NO: 2221 - protein, 16 aa, Homo sapiens
GFSLDEATNLNGGLLR

SEQ ID NO: 2222 - protein, 28 aa, Homo sapiens
GHVLFRPTVSQQQSCPTCSTSLLNGHFK

SEQ ID NO: 2223 - protein, 37 aa, Homo sapiens
GIEILNQVQESLPELSNHASILIMLTDGDPTEGVTDR

SEQ ID NO: 2224 - protein, 28 aa, Homo sapiens
GMADQDGLKPTIDKPSEDSPPLEMLGPR

SEQ ID NO: 2225 - protein, 29 aa, Homo sapiens
GRFPLYNLGFGHNVDFNFLEVMSMENNGR

SEQ ID NO: 2226 - protein, 19 aa, Homo sapiens
GSLVQASEANLQAAQDFVR

SEQ ID NO: 2227 - protein, 18 aa, Homo sapiens
GSSVHQDFLGFYVLDSHR

SEQ ID NO: 2228 - protein, 25 aa, Homo sapiens
ICDLLVANNHFAHFFAPQNLTNMNK

SEQ ID NO: 2229 - protein, 19 aa, Homo sapiens
ILGDMQPGDYFDLVLFGTR

SEQ ID NO: 2230 - protein, 20 aa, Homo sapiens
IYEDHDATQQLQGFYSQVAK

SEQ ID NO: 2231 - protein, 44 aa, Homo sapiens
IYEDHDATQQLQGFYSQVAKPLLVDVDLQYPQDAVLALTQNHHK

SEQ ID NO: 2232 - protein, 29 aa, Homo sapiens
KGHVLFRPTVSQQQSCPTCSTSLLNGHFK

SEQ ID NO: 2233 - protein, 10 aa, Homo sapiens
LDAQASFLPK

SEQ ID NO: 2234 - protein, 33 aa, Homo sapiens
LGIANPATDFQLEVTPQNITLNPGFGGPVFSWR

SEQ ID NO: 2235 - protein, 13 aa, Homo sapiens
LWAYLTIQELLAK

SEQ ID NO: 2236 - protein, 14 aa, Homo sapiens
LWAYLTIQELLAKR

SEQ ID NO: 2237 - protein, 34 aa, Homo sapiens
MDGAMGPRGLLLCMYLVSLLILQAMPALGSATGR

SEQ ID NO: 2238 - protein, 10 aa, Homo sapiens
NHMQYEIVIK

SEQ ID NO: 2239 - protein, 13 aa, Homo sapiens
NVVFVIDISGSMR

SEQ ID NO: 2240 - protein, 24 aa, Homo sapiens
PLLVDVDLQYPQDAVLALTQNHHK

SEQ ID NO: 2241 - protein, 22 aa, Homo sapiens
PTVSQQQSCPTCSTSLLNGHFK

SEQ ID NO: 2242 - protein, 13 aa, Homo sapiens
QAVDTAVDGVFIR

SEQ ID NO: 2243 - protein, 20 aa, Homo sapiens
QLVHHFEIDVDIFEPQGISK

SEQ ID NO: 2244 - protein, 13 aa, Homo sapiens
QYYEGSEIVVAGR

SEQ ID NO: 2245 - protein, 11 aa, Homo sapiens
RNHMQYEIVIK

SEQ ID NO: 2246 - protein, 14 aa, Homo sapiens
RQAVDTAVDGVFIR

SEQ ID NO: 2247 - protein, 21 aa, Homo sapiens
TAFISDFAVTADGNAFIGDIK

SEQ ID NO: 2248 - protein, 20 aa, Homo sapiens
TFVLSALQPSPTHSSSNTQR

SEQ ID NO: 2249 - protein, 35 aa, Homo sapiens
THGLLGQFFHPIGFEVSDIHPGSDPTKPDATMVVR

SEQ ID NO: 2250 - protein, 16 aa, Homo sapiens
TMEQFTIHLTVNPQSK

SEQ ID NO: 2251 - protein, 12 aa, Homo sapiens
VTFQLTYEEVLK

SEQ ID NO: 2252 - protein, 13 aa, Homo sapiens
VTFQLTYEEVLKR

SEQ ID NO: 2253 - protein, 17 aa, Homo sapiens
VTGVDTDPHFIIHVPQK

SEQ ID NO: 2254 - protein, 7 aa, Homo sapiens
VTYDVSR

SEQ ID NO: 2255 - protein, 34 aa, Homo sapiens
VTYDVSRDKICDLLVANNHFAHFFAPQNLTNMNK

SEQ ID NO: 2256 - protein, 15 aa, Homo sapiens
AEDHFSVIDFNQNIR

SEQ ID NO: 2257 - protein, 25 aa, Homo sapiens
AGELEVFNGYFVHFFAPDNLDPIPK

SEQ ID NO: 2258 - protein, 13 aa, Homo sapiens
AHVSFKPTVAQQR

SEQ ID NO: 2259 - protein, 36 aa, Homo sapiens
AIFILNEANNLGLLDPNSVSLIILVSDGDPTVGELK

SEQ ID NO: 2260 - protein, 24 aa, Homo sapiens
ENIQDNISLFSLGMGFDVDYDFLK

SEQ ID NO: 2261 - protein, 25 aa, Homo sapiens
ENIQDNISLFSLGMGFDVDYDFLKR

SEQ ID NO: 2262 - protein, 15 aa, Homo sapiens
ETAVDGELVVLYDVK

SEQ ID NO: 2263 - protein, 39 aa, Homo sapiens
FDPAKLDQIESVITATSANTQLVLETLAQMDDLQDFLSK

SEQ ID NO: 2264 - protein, 20 aa, Homo sapiens
FLHVPDTFEGHFDGVPVISK

SEQ ID NO: 2265 - protein, 11 aa, Homo sapiens
FYNQVSTPLLR

SEQ ID NO: 2266 - protein, 14 aa, Homo sapiens
GAFISNFSMTVDGK

SEQ ID NO: 2267 - protein, 17 aa, Homo sapiens
GAFISNFSMTVDGKTFR

SEQ ID NO: 2268 - protein, 8 aa, Homo sapiens
HADPDFTR

SEQ ID NO: 2269 - protein, 15 aa, Homo sapiens
HLEVDVWVIEPQGLR

SEQ ID NO: 2270 - protein, 15 aa, Homo sapiens
IQPSGGTNINEALLR

SEQ ID NO: 2271 - protein, 12 aa, Homo sapiens
IYGNQDTSSQLK

SEQ ID NO: 2272 - protein, 7 aa, Homo sapiens
IYLQPGR

SEQ ID NO: 2273 - protein, 12 aa, Homo sapiens
KFYNQVSTPLLR

SEQ ID NO: 2274 - protein, 15 aa, Homo sapiens
KLWAYLTINQLLAER

SEQ ID NO: 2275 - protein, 34 aa, Homo sapiens
LDQIESVITATSANTQLVLETLAQMDDLQDFLSK

SEQ ID NO: 2276 - protein, 36 aa, Homo sapiens
LDQIESVITATSANTQLVLETLAQMDDLQDFLSKDK

SEQ ID NO: 2277 - protein, 14 aa, Homo sapiens
LWAYLTINQLLAER

SEQ ID NO: 2278 - protein, 22 aa, Homo sapiens
MLADAPPQDPSCCSGALYYGSK

SEQ ID NO: 2279 - protein, 8 aa, Homo sapiens
NDLISATK

SEQ ID NO: 2280 - protein, 16 aa, Homo sapiens
NILFVIDVSGSMWGVK

SEQ ID NO: 2281 - protein, 33 aa, Homo sapiens
NVQFNYPHTSVTDVTQNNFHNYFGGSEIVVAGK

SEQ ID NO: 2282 - protein, 28 aa, Homo sapiens
SILQMSLDHHIVTPLTSLVIENEAGDER

SEQ ID NO: 2283 - protein, 50 aa, Homo sapiens
SILQMSLDHHIVTPLTSLVIENEAGDERMLADAPPQDPSCCSGALYYGSK

SEQ ID NO: 2284 - protein, 10 aa, Homo sapiens
SSALDMENFR

SEQ ID NO: 2285 - protein, 20 aa, Homo sapiens
SSALDMENFRTEVNVLPGAK

SEQ ID NO: 2286 - protein, 10 aa, Homo sapiens
TEVNVLPGAK

SEQ ID NO: 2287 - protein, 7 aa, Homo sapiens
TILDDLR

SEQ ID NO: 2288 - protein, 22 aa, Homo sapiens
TILDDLRAEDHFSVIDFNQNIR

SEQ ID NO: 2289 - protein, 11 aa, Homo sapiens
TWRNDLISATK

SEQ ID NO: 2290 - protein, 11 aa, Homo sapiens
VQFELHYQEVK

SEQ ID NO: 2291 - protein, 19 aa, Homo sapiens
VVNNSPQPQNVVFDVQIPK

SEQ ID NO: 2292 - protein, 19 aa, Homo sapiens
YIEKIQPSGGTNINEALLR

SEQ ID NO: 2293 - protein, 15 aa, Homo sapiens
ADTAKEVSFDVELPK

SEQ ID NO: 2294 - protein, 7 aa, Homo sapiens
ALDLSLK

SEQ ID NO: 2295 - protein, 15 aa, Homo sapiens
ALQERDYIFGNYIER

SEQ ID NO: 2296 - protein, 19 aa, Homo sapiens
AVNRADTAKEVSFDVELPK

SEQ ID NO: 2297 - protein, 25 aa, Homo sapiens
AVPSTFSWLDTVTVTQDGLSMMINR

SEQ ID NO: 2298 - protein, 17 aa, Homo sapiens
DDALCFNIDEAPGTVLR

SEQ ID NO: 2299 - protein, 12 aa, Homo sapiens
DFLGFYVVDSHR

SEQ ID NO: 2300 - protein, 10 aa, Homo sapiens
DYIFGNYIER

SEQ ID NO: 2301 - protein, 15 aa, Homo sapiens
EHLVQATPENLQEAR

SEQ ID NO: 2302 - protein, 27 aa, Homo sapiens
ESPGNVQIVNGYFVHFFAPQGLPVVPK

SEQ ID NO: 2303 - protein, 10 aa, Homo sapiens
EVSFDVELPK

SEQ ID NO: 2304 - protein, 29 aa, Homo sapiens
FPLYNLGFGNNLNYNFLENMALENHGFAR

SEQ ID NO: 2305 - protein, 12 aa, Homo sapiens
FTVSVNVAAGSK

SEQ ID NO: 2306 - protein, 17 aa, Homo sapiens
GHGATNDLTFTEEVDMK

SEQ ID NO: 2307 - protein, 21 aa, Homo sapiens
GHGATNDLTFTEEVDMKEMEK

SEQ ID NO: 2308 - protein, 13 aa, Homo sapiens
GHVSFKPSLDQQR

SEQ ID NO: 2309 - protein, 11 aa, Homo sapiens
GMTNINDGLLR

SEQ ID NO: 2310 - protein, 35 aa, Homo sapiens
HFEIEVDIFEPQGISMLDAEASFITNDLLGSALTK

SEQ ID NO: 2311 - protein, 24 aa, Homo sapiens
ILEDMQEEDYLNFILFSGDVSTWK

SEQ ID NO: 2312 - protein, 57 aa, Homo sapiens
IYEDSDADLQLQGFYEEVANPLLTGVEMEYPENAILDLTQNTYQHFYDGSEIVVAGR

SEQ ID NO: 2313 - protein, 18 aa, Homo sapiens
LGIANAQMDFQVEVTTEK

SEQ ID NO: 2314 - protein, 19 aa, Homo sapiens
LIQDAVTGLTVNGQITGDK

SEQ ID NO: 2315 - protein, 20 aa, Homo sapiens
LIQDAVTGLTVNGQITGDKR

SEQ ID NO: 2316 - protein, 10 aa, Homo sapiens
LVDEDMNSFK

SEQ ID NO: 2317 - protein, 13 aa, Homo sapiens
LWAYLTIEQLLEK

SEQ ID NO: 2318 - protein, 14 aa, Homo sapiens
LWAYLTIEQLLEKR

SEQ ID NO: 2319 - protein, 19 aa, Homo sapiens
MSAQTHGLLGQFFQPFDFK

SEQ ID NO: 2320 - protein, 13 aa, Homo sapiens
NAHGEEKENLTAR

SEQ ID NO: 2321 - protein, 35 aa, Homo sapiens
NAIGGKFPLYNLGFGNNLNYNFLENMALENHGFAR

SEQ ID NO: 2322 - protein, 21 aa, Homo sapiens
NMVVSFGDGVTFVVVLHQVWK

SEQ ID NO: 2323 - protein, 15 aa, Homo sapiens
NVAFVIDISGSMAGR

SEQ ID NO: 2324 - protein, 15 aa, Homo sapiens
PGSDPTKPDATLVVK

SEQ ID NO: 2325 - protein, 17 aa, Homo sapiens
RSLPEGVANGIEVYSTK

SEQ ID NO: 2326 - protein, 22 aa, Homo sapiens
SCPTCTDSLLNGDFTITYDVNR

SEQ ID NO: 2327 - protein, 16 aa, Homo sapiens
SLPEGVANGIEVYSTK

SEQ ID NO: 2328 - protein, 19 aa, Homo sapiens
STSIVIMLTDGDANVGESR

SEQ ID NO: 2329 - protein, 22 aa, Homo sapiens
STSIVIMLTDGDANVGESRPEK

SEQ ID NO: 2330 - protein, 21 aa, Homo sapiens
TAFITNFTLTIDGVTYPGNVK

SEQ ID NO: 2331 - protein, 20 aa, Homo sapiens
VSDIRPGSDPTKPDATLVVK

SEQ ID NO: 2332 - protein, 12 aa, Homo sapiens
VTFELTYEELLK

SEQ ID NO: 2333 - protein, 13 aa, Homo sapiens
VTFELTYEELLKR

SEQ ID NO: 2334 - protein, 27 aa, Homo sapiens
VVCWFVHNNGEGLIDGVHTDYIVPNLF

SEQ ID NO: 2335 - protein, 22 aa, Homo sapiens
YHFVTPLTSMVVTKPEDNEDER

SEQ ID NO: 2336 - protein, 13 aa, Homo sapiens
AEAQAQYSAAVAK

SEQ ID NO: 2337 - protein, 20 aa, Homo sapiens
AFITNFSMIIDGMTYPGIIK

SEQ ID NO: 2338 - protein, 22 aa, Homo sapiens
AFITNFSMIIDGMTYPGIIKEK

SEQ ID NO: 2339 - protein, 11 aa, Homo sapiens
AGFSWIEVTFK

SEQ ID NO: 2340 - protein, 28 aa, Homo sapiens
AGFSWIEVTFKNPLVWVHASPEHVVVTR

SEQ ID NO: 2341 - protein, 28 aa, Homo sapiens
AISGGSIQIENGYFVHYFAPEGLTTMPK

SEQ ID NO: 2342 - protein, 15 aa, Homo sapiens
ANTVQEATFQMELPK

SEQ ID NO: 2343 - protein, 16 aa, Homo sapiens
ANTVQEATFQMELPKK

SEQ ID NO: 2344 - protein, 36 aa, Homo sapiens
ANTVQEATFQMELPKKAFITNFSMIIDGMTYPGIIK

SEQ ID NO: 2345 - protein, 24 aa, Homo sapiens
APAVPAPIQAPSAILPLPGQSVER

SEQ ID NO: 2346 - protein, 16 aa, Homo sapiens
DQFNLIVFSTEATQWR

SEQ ID NO: 2347 - protein, 29 aa, Homo sapiens
DQFNLIVFSTEATQWRPSLVPASAENVNK

SEQ ID NO: 2348 - protein, 33 aa, Homo sapiens
DTDRFSSHVGGTLGQFYQEVLWGSPAASDDGRR

SEQ ID NO: 2349 - protein, 15 aa, Homo sapiens
EKAEAQAQYSAAVAK

SEQ ID NO: 2350 - protein, 13 aa, Homo sapiens
EKAGFSWIEVTFK

SEQ ID NO: 2351 - protein, 11 aa, Homo sapiens
ETLFSVMPGLK

SEQ ID NO: 2352 - protein, 10 aa, Homo sapiens
FKPTLSQQQK

SEQ ID NO: 2353 - protein, 28 aa, Homo sapiens
FSSHVGGTLGQFYQEVLWGSPAASDDGR

SEQ ID NO: 2354 - protein, 29 aa, Homo sapiens
FSSHVGGTLGQFYQEVLWGSPAASDDGRR

SEQ ID NO: 2355 - protein, 12 aa, Homo sapiens
GPDVLTATVSGK

SEQ ID NO: 2356 - protein, 37 aa, Homo sapiens
GPDVLTATVSGKLPTQNITFQTESSVAEQEAEFQSPK

SEQ ID NO: 2357 - protein, 38 aa, Homo sapiens
HLQMDIHIFEPQGISFLETESTFMTNQLVDALTTWQNK

SEQ ID NO: 2358 - protein, 40 aa, Homo sapiens
HLQMDIHIFEPQGISFLETESTFMTNQLVDALTTWQNKTK

SEQ ID NO: 2359 - protein, 24 aa, Homo sapiens
HRQGPVNLLSDPEQGVEVTGQYER

SEQ ID NO: 2360 - protein, 44 aa, Homo sapiens
IHEDSDSALQLQDFYQEVANPLLTAVTFEYPSNAVEEVTQNNFR

SEQ ID NO: 2361 - protein, 8 aa, Homo sapiens
ILDDLSPR

SEQ ID NO: 2362 - protein, 37 aa, Homo sapiens
ILDDLSPRDQFNLIVFSTEATQWRPSLVPASAENVNK

SEQ ID NO: 2363 - protein, 11 aa, Homo sapiens
IPKPEASFSPR

SEQ ID NO: 2364 - protein, 12 aa, Homo sapiens
ITFELVYEELLK

SEQ ID NO: 2365 - protein, 13 aa, Homo sapiens
ITFELVYEELLKR

SEQ ID NO: 2366 - protein, 21 aa, Homo sapiens
KAFITNFSMIIDGMTYPGIIK

SEQ ID NO: 2367 - protein, 23 aa, Homo sapiens
KAFITNFSMIIDGMTYPGIIKEK

SEQ ID NO: 2368 - protein, 10 aa, Homo sapiens
LALDNGGLAR

SEQ ID NO: 2369 - protein, 6 aa, Homo sapiens
LCVDPR

SEQ ID NO: 2370 - protein, 19 aa, Homo sapiens
LDYQEGPPGVEISCWSVEL

SEQ ID NO: 2371 - protein, 9 aa, Homo sapiens
LGVYELLLK

SEQ ID NO: 2372 - protein, 13 aa, Homo sapiens
LLFKGSEMVVAGK

SEQ ID NO: 2373 - protein, 25 aa, Homo sapiens
LPEGSVSLIILLTDGDPTVGETNPR

SEQ ID NO: 2374 - protein, 25 aa, Homo sapiens
LPTQNITFQTESSVAEQEAEFQSPK

SEQ ID NO: 2375 - protein, 34 aa, Homo sapiens
LPTQNITFQTESSVAEQEAEFQSPKYIFHNFMER

SEQ ID NO: 2376 - protein, 16 aa, Homo sapiens
LQDRGPDVLTATVSGK

SEQ ID NO: 2377 - protein, 41 aa, Homo sapiens
LQDRGPDVLTATVSGKLPTQNITFQTESSVAEQEAEFQSPK

SEQ ID NO: 2378 - protein, 26 aa, Homo sapiens
LWAYLTIQQLLEQTVSASDADQQALR

SEQ ID NO: 2379 - protein, 11 aa, Homo sapiens
MNFRPGVLSSR

SEQ ID NO: 2380 - protein, 13 aa, Homo sapiens
NGIDIYSLTVDSR

SEQ ID NO: 2381 - protein, 16 aa, Homo sapiens
NMEQFQVSVSVAPNAK

SEQ ID NO: 2382 - protein, 17 aa, Homo sapiens
NPLVWVHASPEHVVVTR

SEQ ID NO: 2383 - protein, 23 aa, Homo sapiens
NQALNLSLAYSFVTPLTSMVVTK

SEQ ID NO: 2384 - protein, 35 aa, Homo sapiens
NQALNLSLAYSFVTPLTSMVVTKPDDQEQSQVAEK

SEQ ID NO: 2385 - protein, 42 aa, Homo sapiens
NQALNLSLAYSFVTPLTSMVVTKPDDQEQSQVAEKPMEGESR

SEQ ID NO: 2386 - protein, 11 aa, Homo sapiens
NVHSAGAAGSR

SEQ ID NO: 2387 - protein, 10 aa, Homo sapiens
NVHSGSTFFK

SEQ ID NO: 2388 - protein, 8 aa, Homo sapiens
NVVFVIDK

SEQ ID NO: 2389 - protein, 13 aa, Homo sapiens
PSLVPASAENVNK

SEQ ID NO: 2390 - protein, 22 aa, Homo sapiens
QGPVNLLSDPEQGVEVTGQYER

SEQ ID NO: 2391 - protein, 24 aa, Homo sapiens
QGPVNLLSDPEQGVEVTGQYEREK

SEQ ID NO: 2392 - protein, 20 aa, Homo sapiens
QLGLPGPPDVPDHAAYHPFR

SEQ ID NO: 2393 - protein, 21 aa, Homo sapiens
QLGLPGPPDVPDHAAYHPFRR

SEQ ID NO: 2394 - protein, 45 aa, Homo sapiens
RIHEDSDSALQLQDFYQEVANPLLTAVTFEYPSNAVEEVTQNNFR

SEQ ID NO: 2395 - protein, 20 aa, Homo sapiens
RLDYQEGPPGVEISCWSVEL

SEQ ID NO: 2396 - protein, 10 aa, Homo sapiens
RLGVYELLLK

SEQ ID NO: 2397 - protein, 33 aa, Homo sapiens
SFAAGIQALGGTNINDAMLMAVQLLDSSNQEER

SEQ ID NO: 2398 - protein, 16 aa, Homo sapiens
SPEQQETVLDGNLIIR

SEQ ID NO: 2399 - protein, 11 aa, Homo sapiens
TGLLLLSDPDK

SEQ ID NO: 2400 - protein, 22 aa, Homo sapiens
TGLLLLSDPDKVTIGLLFWDGR

SEQ ID NO: 2401 - protein, 27 aa, Homo sapiens
TGLLLLSDPDKVTIGLLFWDGRGEGLR

SEQ ID NO: 2402 - protein, 11 aa, Homo sapiens
VTIGLLFWDGR

SEQ ID NO: 2403 - protein, 20 aa, Homo sapiens
VVNRANTVQEATFQMELPKK

SEQ ID NO: 2404 - protein, 13 aa, Homo sapiens
WKETLFSVMPGLK

SEQ ID NO: 2405 - protein, 9 aa, Homo sapiens
YIFHNFMER

SEQ ID NO: 2406 - protein, 19 aa, Homo sapiens
YSLFCLGFGFDVSYAFLEK

SEQ ID NO: 2407 - protein, 7 aa, Homo sapiens
YYLQGAK

SEQ ID NO: 2408 - protein, 14 aa, Homo sapiens
DECPSAFDGLYFLR

SEQ ID NO: 2409 - protein, 10 aa, Homo sapiens
DLGIWHVPNK

SEQ ID NO: 2410 - protein, 10 aa, Homo sapiens
EFTAGFVQFR

SEQ ID NO: 2411 - protein, 12 aa, Homo sapiens
EITEAAVLLFYR

SEQ ID NO: 2412 - protein, 19 aa, Homo sapiens
TDTGFLQTLGHNLFGIYQK

SEQ ID NO: 2413 - protein, 20 aa, Homo sapiens
AGTYLPQSYLIHEHMVITDR

SEQ ID NO: 2414 - protein, 15 aa, Homo sapiens
CYVIPLNTSIVMPPR

SEQ ID NO: 2415 - protein, 13 aa, Homo sapiens
IENIDHLGFFIYR

SEQ ID NO: 2416 - protein, 31 aa, Homo sapiens
IFEEEEVEFISVPVPEFADSDPANIVHDFNK

SEQ ID NO: 2417 - protein, 11 aa, Homo sapiens
LTAYLDLNLDK

SEQ ID NO: 2418 - protein, 10 aa, Homo sapiens
NLLELLINIK

SEQ ID NO: 2419 - protein, 17 aa, Homo sapiens
CLLFSFLPASSINDMEK

SEQ ID NO: 2420 - protein, 13 aa, Homo sapiens
CQFFSYATQTFHK

SEQ ID NO: 2421 - protein, 14 aa, Homo sapiens
CQFFTYSLLPEDCK

SEQ ID NO: 2422 - protein, 17 aa, Homo sapiens
CQFFTYSLLPEDCKEEK

SEQ ID NO: 2423 - protein, 9 aa, Homo sapiens
DSVTGTLPK

SEQ ID NO: 2424 - protein, 8 aa, Homo sapiens
DTPFSQIK

SEQ ID NO: 2425 - protein, 17 aa, Homo sapiens
DTPFSQIKEIIIHQNYK

SEQ ID NO: 2426 - protein, 9 aa, Homo sapiens
EIIIHQNYK

SEQ ID NO: 2427 - protein, 11 aa, Homo sapiens
EKGEIQNILQK

SEQ ID NO: 2428 - protein, 6 aa, Homo sapiens
FGCFLK

SEQ ID NO: 2429 - protein, 15 aa, Homo sapiens
FGCFLKDSVTGTLPK

SEQ ID NO: 2430 - protein, 19 aa, Homo sapiens
GDTSTIYTNCWVTGWGFSK

SEQ ID NO: 2431 - protein, 9 aa, Homo sapiens
GEIQNILQK

SEQ ID NO: 2432 - protein, 18 aa, Homo sapiens
GGDVASMYTPNAQYCQMR

SEQ ID NO: 2433 - protein, 8 aa, Homo sapiens
GVNFNVSK

SEQ ID NO: 2434 - protein, 30 aa, Homo sapiens
HLCGGSLIGHQWVLTAAHCFDGLPLQDVWR

SEQ ID NO: 2435 - protein, 14 aa, Homo sapiens
IAYGTQGSSGYSLR

SEQ ID NO: 2436 - protein, 21 aa, Homo sapiens
IVGGTNSSWGEWPWQVSLQVK

SEQ ID NO: 2437 - protein, 18 aa, Homo sapiens
IYPGVDFGGEELNVTFVK

SEQ ID NO: 2438 - protein, 13 aa, Homo sapiens
IYSGILNLSDITK

SEQ ID NO: 2439 - protein, 21 aa, Homo sapiens
IYSGILNLSDITKDTPFSQIK

SEQ ID NO: 2440 - protein, 30 aa, Homo sapiens
IYSGILNLSDITKDTPFSQIKEIIIHQNYK

SEQ ID NO: 2441 - protein, 13 aa, Homo sapiens
LCNTGDNSVCTTK

SEQ ID NO: 2442 - protein, 12 aa, Homo sapiens
LQAPLNYTEFQK

SEQ ID NO: 2443 - protein, 19 aa, Homo sapiens
LQAPLNYTEFQKPICLPSK

SEQ ID NO: 2444 - protein, 38 aa, Homo sapiens
LQAPLNYTEFQKPICLPSKGDTSTIYTNCWVTGWGFSK

SEQ ID NO: 2445 - protein, 9 aa, Homo sapiens
LSMDGSPTR

SEQ ID NO: 2446 - protein, 13 aa, Homo sapiens
LVGITSWGEGCAR

SEQ ID NO: 2447 - protein, 20 aa, Homo sapiens
TICTYHPNCLFFTFYTNVWK

SEQ ID NO: 2448 - protein, 26 aa, Homo sapiens
TSESGTPSSSTPQENTISGYSLLTCK

SEQ ID NO: 2449 - protein, 27 aa, Homo sapiens
TSESGTPSSSTPQENTISGYSLLTCKR

SEQ ID NO: 2450 - protein, 11 aa, Homo sapiens
VAEYMDWILEK

SEQ ID NO: 2451 - protein, 38 aa, Homo sapiens
VLSNVESGFSLKPCALSEIGCHMNIFQHLAFSDVDVAR

SEQ ID NO: 2452 - protein, 10 aa, Homo sapiens
VLTPDAFVCR

SEQ ID NO: 2453 - protein, 13 aa, Homo sapiens
VNIPLVTNEECQK

SEQ ID NO: 2454 - protein, 12 aa, Homo sapiens
VSEGNHDIALIK

SEQ ID NO: 2455 - protein, 11 aa, Homo sapiens
YSPGGTPTAIK

SEQ ID NO: 2456 - protein, 10 aa, Homo sapiens
GDSGGPLVCK

SEQ ID NO: 2457 - protein, 12 aa, Homo sapiens
AATGECTATVGK

SEQ ID NO: 2458 - protein, 8 aa, Homo sapiens
DFVQPPTK

SEQ ID NO: 2459 - protein, 19 aa, Homo sapiens
DIPTNSPELEETLTHTITK

SEQ ID NO: 2460 - protein, 31 aa, Homo sapiens
DIPTNSPELEETLTHTITKLNAENNATFYFK

SEQ ID NO: 2461 - protein, 11 aa, Homo sapiens
ENFLFLTPDCK

SEQ ID NO: 2462 - protein, 13 aa, Homo sapiens
ESNEELTESCETK

SEQ ID NO: 2463 - protein, 12 aa, Homo sapiens
ESYYFDLTDGLS

SEQ ID NO: 2464 - protein, 20 aa, Homo sapiens
FKLDDDLEHQGGHVLDHGHK

SEQ ID NO: 2465 - protein, 43 aa, Homo sapiens
FSVATQTCQITPAEGPVVTAQYDCLGCVHPISTQSPDLEPILR

SEQ ID NO: 2466 - protein, 19 aa, Homo sapiens
GHGLGHGHEQQHGLGHGHK

SEQ ID NO: 2467 - protein, 22 aa, Homo sapiens
HGIQYFNNNTQHSSLFMLNEVK

SEQ ID NO: 2468 - protein, 23 aa, Homo sapiens
HGIQYFNNNTQHSSLFMLNEVKR

SEQ ID NO: 2469 - protein, 14 aa, Homo sapiens
IASFSQNCDIYPGK

SEQ ID NO: 2470 - protein, 22 aa, Homo sapiens
IASFSQNCDIYPGKDFVQPPTK

SEQ ID NO: 2471 - protein, 7 aa, Homo sapiens
ICVGCPR

SEQ ID NO: 2472 - protein, 13 aa, Homo sapiens
IGEIKEETTSHLR

SEQ ID NO: 2473 - protein, 12 aa, Homo sapiens
ITYSIVQTNCSK

SEQ ID NO: 2474 - protein, 23 aa, Homo sapiens
ITYSIVQTNCSKENFLFLTPDCK

SEQ ID NO: 2475 - protein, 17 aa, Homo sapiens
IYPTVNCQPLGMISLMK

SEQ ID NO: 2476 - protein, 26 aa, Homo sapiens
IYPTVNCQPLGMISLMKRPPGFSPFR

SEQ ID NO: 2477 - protein, 18 aa, Homo sapiens
KIYPTVNCQPLGMISLMK

SEQ ID NO: 2478 - protein, 19 aa, Homo sapiens
KLGQSLDCNAEVYVVPWEK

SEQ ID NO: 2479 - protein, 20 aa, Homo sapiens
KLGQSLDCNAEVYVVPWEKK

SEQ ID NO: 2480 - protein, 9 aa, Homo sapiens
KYFIDFVAR

SEQ ID NO: 2481 - protein, 16 aa, Homo sapiens
KYNSQNQSNNQFVLYR

SEQ ID NO: 2482 - protein, 18 aa, Homo sapiens
LDDDLEHQGGHVLDHGHK

SEQ ID NO: 2483 - protein, 18 aa, Homo sapiens
LGQSLDCNAEVYVVPWEK

SEQ ID NO: 2484 - protein, 19 aa, Homo sapiens
LGQSLDCNAEVYVVPWEKK

SEQ ID NO: 2485 - protein, 12 aa, Homo sapiens
LNAENNATFYFK

SEQ ID NO: 2486 - protein, 17 aa, Homo sapiens
LNAENNATFYFKIDNVK

SEQ ID NO: 2487 - protein, 18 aa, Homo sapiens
LNAENNATFYFKIDNVKK

SEQ ID NO: 2488 - protein, 9 aa, Homo sapiens
QVVAGLNFR

SEQ ID NO: 2489 - protein, 9 aa, Homo sapiens
RPPGFSPFR

SEQ ID NO: 2490 - protein, 21 aa, Homo sapiens
SLWNGDTGECTDNAYIDIQLR

SEQ ID NO: 2491 - protein, 47 aa, Homo sapiens
SSTKFSVATQTCQITPAEGPVVTAQYDCLGCVHPISTQSPDLEPILR

SEQ ID NO: 2492 - protein, 12 aa, Homo sapiens
SVSEINPTTQMK

SEQ ID NO: 2493 - protein, 11 aa, Homo sapiens
TVGSDTFYSFK

SEQ ID NO: 2494 - protein, 15 aa, Homo sapiens
TVGSDTFYSFKYEIK

SEQ ID NO: 2495 - protein, 8 aa, Homo sapiens
TWQDCEYK

SEQ ID NO: 2496 - protein, 12 aa, Homo sapiens
TWQDCEYKDAAK

SEQ ID NO: 2497 - protein, 14 aa, Homo sapiens
YEIKEGDCPVQSGK

SEQ ID NO: 2498 - protein, 8 aa, Homo sapiens
YFIDFVAR

SEQ ID NO: 2499 - protein, 15 aa, Homo sapiens
YNSQNQSNNQFVLYR

SEQ ID NO: 2500 - protein, 19 aa, Homo sapiens
AEQTILPLVDEALQHTTTK

SEQ ID NO: 2501 - protein, 16 aa, Homo sapiens
EDFLDILYDIHYILIK

SEQ ID NO: 2502 - protein, 11 aa, Homo sapiens
EDLHLEPFYWK

SEQ ID NO: 2503 - protein, 24 aa, Homo sapiens
GLFPAVLNLASNALITTNATCGEK

SEQ ID NO: 2504 - protein, 28 aa, Homo sapiens
GTSEDCQPCACPLNIPSNNFSPTCHLDR

SEQ ID NO: 2505 - protein, 18 aa, Homo sapiens
LADEINSIIDYVEDIQTK

SEQ ID NO: 2506 - protein, 19 aa, Homo sapiens
LEQMVMSINLTGPLPAPYK

SEQ ID NO: 2507 - protein, 22 aa, Homo sapiens
LIQLAEGNLNTLVTEMNELLTR

SEQ ID NO: 2508 - protein, 13 aa, Homo sapiens
MLYGLENMTQELK

SEQ ID NO: 2509 - protein, 12 aa, Homo sapiens
MDGMGIEMIDEK

SEQ ID NO: 2510 - protein, 31 aa, Homo sapiens
QANISIVDIDTNQEENIATSSSGNNFGLDLK

SEQ ID NO: 2511 - protein, 13 aa, Homo sapiens
QEGILYVDGASNR

SEQ ID NO: 2512 - protein, 34 aa, Homo sapiens
RVNGTIFGGICEPCQCFGHAESCDDVTGECLNCK

SEQ ID NO: 2513 - protein, 17 aa, Homo sapiens
SLGLICDGCPVGYTGPR

SEQ ID NO: 2514 - protein, 16 aa, Homo sapiens
TPYNILSSPDYVGVTK

SEQ ID NO: 2515 - protein, 26 aa, Homo sapiens
VSQAESHAAQLNDSSAVLDGILDEAK

SEQ ID NO: 2516 - protein, 37 aa, Homo sapiens
VSQAESHAAQLNDSSAVLDGILDEAKNISFNATAAFK

SEQ ID NO: 2517 - protein, 11 aa, Homo sapiens
WYPNISTVMFK

SEQ ID NO: 2518 - protein, 30 aa, Homo sapiens
YIGGGVCINCTQNTAGINCETCTDGFFRPK

SEQ ID NO: 2519 - protein, 14 aa, Homo sapiens
YMQNLTVEQPIEVK

SEQ ID NO: 2520 - protein, 20 aa, Homo sapiens
AMDLDQDVLSALAEVEQLSK

SEQ ID NO: 2521 - protein, 19 aa, Homo sapiens
CGGPGCGGLVTVAHNAWQK

SEQ ID NO: 2522 - protein, 30 aa, Homo sapiens
CLAGYYGDPIIGSGDHCRPCPCPDGPDSGR

SEQ ID NO: 2523 - protein, 22 aa, Homo sapiens
CVCNYLGTVQEHCNGSDCQCDK

SEQ ID NO: 2524 - protein, 13 aa, Homo sapiens
DILAQSPAAEPLK

SEQ ID NO: 2525 - protein, 15 aa, Homo sapiens
EGFYDLSSEDPFGCK

SEQ ID NO: 2526 - protein, 10 aa, Homo sapiens
ELAEQLEFIK

SEQ ID NO: 2527 - protein, 24 aa, Homo sapiens
GIETPQCDQSTGQCVCVEGVEGPR

SEQ ID NO: 2528 - protein, 22 aa, Homo sapiens
GLNCELCMDFYHDLPWRPAEGR

SEQ ID NO: 2529 - protein, 11 aa, Homo sapiens
IPSWTGAGFVR

SEQ ID NO: 2530 - protein, 20 aa, Homo sapiens
KCGGPGCGGLVTVAHNAWQK

SEQ ID NO: 2531 - protein, 18 aa, Homo sapiens
MEMPSTPQQLQNLTEDIR

SEQ ID NO: 2532 - protein, 22 aa, Homo sapiens
NFLTQDSADLDSIEAVANEVLK

SEQ ID NO: 2533 - protein, 33 aa, Homo sapiens
QADEDIQGTQNLLTSIESETAASEETLFNASQR

SEQ ID NO: 2534 - protein, 23 aa, Homo sapiens
SCYQDPVTLQLACVCDPGYIGSR

SEQ ID NO: 2535 - protein, 25 aa, Homo sapiens
SLDIFTVGGSGDGVVTNSAWETFQR

SEQ ID NO: 2536 - protein, 20 aa, Homo sapiens
VESLSQVEVILQHSAADIAR

SEQ ID NO: 2537 - protein, 19 aa, Homo sapiens
VNASTTEPNSTVEQSALMR

SEQ ID NO: 2538 - protein, 19 aa, Homo sapiens
YFAYDCEASFPGISTGPMK

SEQ ID NO: 2539 - protein, 15 aa, Homo sapiens
YSDIEPSTEGEVIFR

SEQ ID NO: 2540 - protein, 8 aa, Homo sapiens
AFDITYVR

SEQ ID NO: 2541 - protein, 27 aa, Homo sapiens
AVEIYASVAQLSPLDSETLENEANNIK

SEQ ID NO: 2542 - protein, 12 aa, Homo sapiens
CDQCEENYFYNR

SEQ ID NO: 2543 - protein, 14 aa, Homo sapiens
IPAINQTITEANEK

SEQ ID NO: 2544 - protein, 15 aa, Homo sapiens
KIPAINQTITEANEK

SEQ ID NO: 2545 - protein, 27 aa, Homo sapiens
KQDDADQDMMMAGMASQAAQEAEINAR

SEQ ID NO: 2546 - protein, 27 aa, Homo sapiens
LGNNEACSSCHCSPVGSLSTQCDSYGR

SEQ ID NO: 2547 - protein, 9 aa, Homo sapiens
LLNNLTSIK

SEQ ID NO: 2548 - protein, 13 aa, Homo sapiens
LNTFGDEVFNDPK

SEQ ID NO: 2549 - protein, 26 aa, Homo sapiens
LQELESLIANLGTGDEMVTDQAFEDR

SEQ ID NO: 2550 - protein, 14 aa, Homo sapiens
LSAEDLVLEGAGLR

SEQ ID NO: 2551 - protein, 22 aa, Homo sapiens
PSAYNFDNSPVLQEWVTATDIR

SEQ ID NO: 2552 - protein, 13 aa, Homo sapiens
QDIAVISDSYFPR

SEQ ID NO: 2553 - protein, 14 aa, Homo sapiens
QVLSYGQNLSFSFR

SEQ ID NO: 2554 - protein, 14 aa, Homo sapiens
SYYYAISDFAVGGR

SEQ ID NO: 2555 - protein, 15 aa, Homo sapiens
TANDTSTEAYNLLLR

SEQ ID NO: 2556 - protein, 33 aa, Homo sapiens
TGGDEQQALCTDEFSDISPLTGGNVAFSTLEGR

SEQ ID NO: 2557 - protein, 17 aa, Homo sapiens
TLAGENQTAFEIEELNR

SEQ ID NO: 2558 - protein, 28 aa, Homo sapiens
VAAANVSVTQPESTGDPNNMTLLAEEAR

SEQ ID NO: 2559 - protein, 11 aa, Homo sapiens
VNNTLSSQISR

SEQ ID NO: 2560 - protein, 11 aa, Homo sapiens
ATAQMLEVMFK

SEQ ID NO: 2561 - protein, 17 aa, Homo sapiens
ATAQMLEVMFKGEIFHR

SEQ ID NO: 2562 - protein, 13 aa, Homo sapiens
DFLFLGANVQYMR

SEQ ID NO: 2563 - protein, 15 aa, Homo sapiens
FNDKLAEGFPLPLLK

SEQ ID NO: 2564 - protein, 17 aa, Homo sapiens
GISISVNLLLGSESSGR

SEQ ID NO: 2565 - protein, 19 aa, Homo sapiens
GLQYAAQEGLLALQSELLR

SEQ ID NO: 2566 - protein, 38 aa, Homo sapiens
GRYEFHSLNIHSCELLHSALRPVPGQGLSLSISDSSIR

SEQ ID NO: 2567 - protein, 7 aa, Homo sapiens
ICEMIQK

SEQ ID NO: 2568 - protein, 23 aa, Homo sapiens
ITDKGLQYAAQEGLLALQSELLR

SEQ ID NO: 2569 - protein, 11 aa, Homo sapiens
ITLPDFTGDLR

SEQ ID NO: 2570 - protein, 17 aa, Homo sapiens
ITLPDFTGDLRIPHVGR

SEQ ID NO: 2571 - protein, 11 aa, Homo sapiens
LAEGFPLPLLK

SEQ ID NO: 2572 - protein, 12 aa, Homo sapiens
LAEGFPLPLLKR

SEQ ID NO: 2573 - protein, 10 aa, Homo sapiens
LQGSFDVSVK

SEQ ID NO: 2574 - protein, 17 aa, Homo sapiens
LSVATNVSATLTFNTSK

SEQ ID NO: 2575 - protein, 45 aa, Homo sapiens
LYPNMNLELQGSVPSAPLLNFSPGNLSVDPYMEIDAFVLLPSSSK

SEQ ID NO: 2576 - protein, 50 aa, Homo sapiens
LYPNMNLELQGSVPSAPLLNFSPGNLSVDPYMEIDAFVLLPSSSKEPVFR

SEQ ID NO: 2577 - protein, 40 aa, Homo sapiens
MVYFAISDYVFNTASLVYHEEGYLNFSITDDMIPPDSNIR

SEQ ID NO: 2578 - protein, 21 aa, Homo sapiens
NHRSPVTLLAAVMSLPEEHNK

SEQ ID NO: 2579 - protein, 37 aa, Homo sapiens
PTVTASSCSSDIADVEVDMSGDLGWLLNLFHNQIESK

SEQ ID NO: 2580 - protein, 17 aa, Homo sapiens
PVPGQGLSLSISDSSIR

SEQ ID NO: 2581 - protein, 13 aa, Homo sapiens
RVQLYDLGLQIHK

SEQ ID NO: 2582 - protein, 18 aa, Homo sapiens
SPVTLLAAVMSLPEEHNK

SEQ ID NO: 2583 - protein, 34 aa, Homo sapiens
SVSSDLQPYLQTLPVTTEIDSFADIDYSLVEAPR

SEQ ID NO: 2584 - protein, 24 aa, Homo sapiens
VGLFNAELLEALLNYYILNTFYPK

SEQ ID NO: 2585 - protein, 12 aa, Homo sapiens
VQLYDLGLQIHK

SEQ ID NO: 2586 - protein, 19 aa, Homo sapiens
YEFHSLNIHSCELLHSALR

SEQ ID NO: 2587 - protein, 36 aa, Homo sapiens
YEFHSLNIHSCELLHSALRPVPGQGLSLSISDSSIR

SEQ ID NO: 2588 - protein, 24 aa, Homo sapiens
AELSNHTRPVILVPGCLGNQLEAK

SEQ ID NO: 2589 - protein, 25 aa, Homo sapiens
DLLAGLPAPGVEVYCLYGVGLPTPR

SEQ ID NO: 2590 - protein, 18 aa, Homo sapiens
FFADLHFEEGWYMWLQSR

SEQ ID NO: 2591 - protein, 17 aa, Homo sapiens
FIDGFISLGAPWGGSIK

SEQ ID NO: 2592 - protein, 37 aa, Homo sapiens
FIDGFISLGAPWGGSIKPMLVLASGDNQGIPIMSSIK

SEQ ID NO: 2593 - protein, 12 aa, Homo sapiens
ITTTSPWMFPSR

SEQ ID NO: 2594 - protein, 28 aa, Homo sapiens
KTEDFFTIWLDLNMFLPLGVDCWIDNTR

SEQ ID NO: 2595 - protein, 14 aa, Homo sapiens
LAGLVEEMHAAYGK

SEQ ID NO: 2596 - protein, 19 aa, Homo sapiens
LAGYLHTLVQNLVNNGYVR

SEQ ID NO: 2597 - protein, 13 aa, Homo sapiens
LDKPDVVNWMCYR

SEQ ID NO: 2598 - protein, 11 aa, Homo sapiens
LEPGQQEEYYR

SEQ ID NO: 2599 - protein, 20 aa, Homo sapiens
MAWPEDHVFISTPSFNYTGR

SEQ ID NO: 2600 - protein, 16 aa, Homo sapiens
PVILVPGCLGNQLEAK

SEQ ID NO: 2601 - protein, 14 aa, Homo sapiens
SSGLVSNAPGVQIR

SEQ ID NO: 2602 - protein, 11 aa, Homo sapiens
STELCGLWQGR

SEQ ID NO: 2603 - protein, 27 aa, Homo sapiens
TEDFFTIWLDLNMFLPLGVDCWIDNTR

SEQ ID NO: 2604 - protein, 28 aa, Homo sapiens
TYIYDHGFPYTDPVGVLYEDGDDTVATR

SEQ ID NO: 2605 - protein, 11 aa, Homo sapiens
TYSVEYLDSSK

SEQ ID NO: 2606 - protein, 6 aa, Homo sapiens
CDYWIR

SEQ ID NO: 2607 - protein, 16 aa, Homo sapiens
EDKDPQKMYATIYELK

SEQ ID NO: 2608 - protein, 13 aa, Homo sapiens
EDKSYNVTSVLFR

SEQ ID NO: 2609 - protein, 7 aa, Homo sapiens
ELTSELK

SEQ ID NO: 2610 - protein, 12 aa, Homo sapiens
ELTSELKENFIR

SEQ ID NO: 2611 - protein, 9 aa, Homo sapiens
MYATIYELK

SEQ ID NO: 2612 - protein, 12 aa, Homo sapiens
MYATIYELKEDK

SEQ ID NO: 2613 - protein, 22 aa, Homo sapiens
MYATIYELKEDKSYNVTSVLFR

SEQ ID NO: 2614 - protein, 21 aa, Homo sapiens
SLGLPENHIVFPVPIDQCIDG

SEQ ID NO: 2615 - protein, 10 aa, Homo sapiens
SYNVTSVLFR

SEQ ID NO: 2616 - protein, 11 aa, Homo sapiens
SYPGLTSYLVR

SEQ ID NO: 2617 - protein, 17 aa, Homo sapiens
TFVPGCQPGEFTLGNIK

SEQ ID NO: 2618 - protein, 14 aa, Homo sapiens
TKELTSELKENFIR

SEQ ID NO: 2619 - protein, 15 aa, Homo sapiens
VPLQQNFQDNQFQGK

SEQ ID NO: 2620 - protein, 15 aa, Homo sapiens
VVSTNYNQHAMVFFK

SEQ ID NO: 2621 - protein, 13 aa, Homo sapiens
WYVVGLAGNAILR

SEQ ID NO: 2622 - protein, 12 aa, Homo sapiens
AYYHLLEQVAPK

SEQ ID NO: 2623 - protein, 26 aa, Homo sapiens
EGICAIGGTSEQSSVGTQHSYSEEEK

SEQ ID NO: 2624 - protein, 16 aa, Homo sapiens
FSLVGIGGQDLNEGNR

SEQ ID NO: 2625 - protein, 24 aa, Homo sapiens
HVIPMNPNTNDLFNAVGDGIVLCK

SEQ ID NO: 2626 - protein, 8 aa, Homo sapiens
ISFDEFIK

SEQ ID NO: 2627 - protein, 25 aa, Homo sapiens
ISTSLPVLDLIDAIQPGSINYDLLK

SEQ ID NO: 2628 - protein, 12 aa, Homo sapiens
LNLAFIANLFNR

SEQ ID NO: 2629 - protein, 9 aa, Homo sapiens
LSPEELLLR

SEQ ID NO: 2630 - protein, 13 aa, Homo sapiens
MINLSVPDTIDER

SEQ ID NO: 2631 - protein, 15 aa, Homo sapiens
VNDDIIVNWVNETLR

SEQ ID NO: 2632 - protein, 20 aa, Homo sapiens
VNHLYSDLSDALVIFQLYEK

SEQ ID NO: 2633 - protein, 14 aa, Homo sapiens
VYALPEDLVEVNPK

SEQ ID NO: 2634 - protein, 9 aa, Homo sapiens
YAFVNWINK

SEQ ID NO: 2635 - protein, 13 aa, Homo sapiens
FNSSGTHFSNLSK

SEQ ID NO: 2636 - protein, 26 aa, Homo sapiens
GSFQMVHCNCSVHECCECLVPVPTAK

SEQ ID NO: 2637 - protein, 16 aa, Homo sapiens
ILTSVGSNVSFHCIYK

SEQ ID NO: 2638 - protein, 30 aa, Homo sapiens
INHSLGSLDSPPTCVLPDSVVKPLPPSSVK

SEQ ID NO: 2639 - protein, 15 aa, Homo sapiens
IPQSQYDVVSDHVSK

SEQ ID NO: 2640 - protein, 18 aa, Homo sapiens
ISWSSPPLVPFPLQYQVK

SEQ ID NO: 2641 - protein, 23 aa, Homo sapiens
IVSATSLLVDSILPGSSYEVQVR

SEQ ID NO: 2642 - protein, 22 aa, Homo sapiens
LDGLGYWSNWSNPAYTVVMDIK

SEQ ID NO: 2643 - protein, 10 aa, Homo sapiens
LNDTLLMCLK

SEQ ID NO: 2644 - protein, 21 aa, Homo sapiens
LSCMPPNSTYDYFLLPAGLSK

SEQ ID NO: 2645 - protein, 17 aa, Homo sapiens
SEQDRNCSLCADNIEGK

SEQ ID NO: 2646 - protein, 18 aa, Homo sapiens
SSLYCSDIPSIHPISEPK

SEQ ID NO: 2647 - protein, 20 aa, Homo sapiens
VHLLYVLPEVLEDSPLVPQK

SEQ ID NO: 2648 - protein, 12 aa, Homo sapiens
VTFFNLNETKPR

SEQ ID NO: 2649 - protein, 10 aa, Homo sapiens
YSENSTTVIR

SEQ ID NO: 2650 - protein, 22 aa, Homo sapiens
YVINHHTSCNGTWSEDVGNHTK

SEQ ID NO: 2651 - protein, 12 aa, Homo sapiens
YYIHDHFIPIEK

SEQ ID NO: 2652 - protein, 28 aa, Homo sapiens
AAFGQGSGPIMLDEVQCTGTEASLADCK

SEQ ID NO: 2653 - protein, 13 aa, Homo sapiens
AAIPSALDTNSSK

SEQ ID NO: 2654 - protein, 13 aa, Homo sapiens
ALGFENATQALGR

SEQ ID NO: 2655 - protein, 20 aa, Homo sapiens
ALMLCEGLFVADVTDFEGWK

SEQ ID NO: 2656 - protein, 12 aa, Homo sapiens
ASHEEVEGLVEK

SEQ ID NO: 2657 - protein, 10 aa, Homo sapiens
AVDTWSWGER

SEQ ID NO: 2658 - protein, 11 aa, Homo sapiens
DAGVVCTNETR

SEQ ID NO: 2659 - protein, 20 aa, Homo sapiens
DAGVVCTNETRSTHTLDLSR

SEQ ID NO: 2660 - protein, 14 aa, Homo sapiens
ELSEALGQIFDSQR

SEQ ID NO: 2661 - protein, 19 aa, Homo sapiens
EPGSNVTMSVDAECVPMVR

SEQ ID NO: 2662 - protein, 28 aa, Homo sapiens
FPMMLPEELFELQFNLSLYWSHEALFQK

SEQ ID NO: 2663 - protein, 36 aa, Homo sapiens
GCDLSISVNVQGEDALGFCGHTVILTANLEAQALWK

SEQ ID NO: 2664 - protein, 10 aa, Homo sapiens
GLNLTEDTYK

SEQ ID NO: 2665 - protein, 12 aa, Homo sapiens
GLNLTEDTYKPR

SEQ ID NO: 2666 - protein, 21 aa, Homo sapiens
GQWGTVCDNLWDLTDASVVCR

SEQ ID NO: 2667 - protein, 9 aa, Homo sapiens
IDITLSSVK

SEQ ID NO: 2668 - protein, 19 aa, Homo sapiens
IYTSPTWSAFVTDSSWSAR

SEQ ID NO: 2669 - protein, 18 aa, Homo sapiens
KTLQALEFHTVPFQLLAR

SEQ ID NO: 2670 - protein, 33 aa, Homo sapiens
LCLQFLAWNFEALTQAEAWPSVPTDLLQLLLPR

SEQ ID NO: 2671 - protein, 11 aa, Homo sapiens
PFYLTNSSGVD

SEQ ID NO: 2672 - protein, 40 aa, Homo sapiens
QLQGYCASLFAILLPQDPSFQMPLDLYAYAVATGDALLEK

SEQ ID NO: 2673 - protein, 10 aa, Homo sapiens
RIDITLSSVK

SEQ ID NO: 2674 - protein, 13 aa, Homo sapiens
SDLAVPSELALLK

SEQ ID NO: 2675 - protein, 8 aa, Homo sapiens
SQLVYQSR

SEQ ID NO: 2676 - protein, 16 aa, Homo sapiens
STSSFPCPAGHFNGFR

SEQ ID NO: 2677 - protein, 17 aa, Homo sapiens
TLQALEFHTVPFQLLAR

SEQ ID NO: 2678 - protein, 15 aa, Homo sapiens
TVIRPFYLTNSSGVD

SEQ ID NO: 2679 - protein, 6 aa, Homo sapiens
VEIFYR

SEQ ID NO: 2680 - protein, 33 aa, Homo sapiens
VSWSLVYLPTIQSCWNYGFSCSSDELPVLGLTK

SEQ ID NO: 2681 - protein, 14 aa, Homo sapiens
YKGLNLTEDTYKPR

SEQ ID NO: 2682 - protein, 13 aa, Homo sapiens
YSSDYFQAPSDYR

SEQ ID NO: 2683 - protein, 20 aa, Homo sapiens
YYPYQSFQTPQHPSFLFQDK

SEQ ID NO: 2684 - protein, 21 aa, Homo sapiens
YYPYQSFQTPQHPSFLFQDKR

SEQ ID NO: 2685 - protein, 21 aa, Homo sapiens
APYVWSLPSDLLGLLVPGVSK

SEQ ID NO: 2686 - protein, 36 aa, Homo sapiens
ARPFLSVRPGPTVASGENVTLLCQSQGGMHTFLLTK

SEQ ID NO: 2687 - protein, 14 aa, Homo sapiens
CQGSLETQEYHLYR

SEQ ID NO: 2688 - protein, 36 aa, Homo sapiens
CYGSLSSNPYLLTHPSDPLELVVSGAAETLSPPQNK

SEQ ID NO: 2689 - protein, 9 aa, Homo sapiens
EGAADSPLR

SEQ ID NO: 2690 - protein, 15 aa, Homo sapiens
GQFPILSITWEHAGR

SEQ ID NO: 2691 - protein, 17 aa, Homo sapiens
KPSLSVQPGPVVAPGEK

SEQ ID NO: 2692 - protein, 13 aa, Homo sapiens
LTFQCGSDAGYDR

SEQ ID NO: 2693 - protein, 34 aa, Homo sapiens
PFLSVRPGPTVASGENVTLLCQSQGGMHTFLLTK

SEQ ID NO: 2694 - protein, 28 aa, Homo sapiens
PGPTVASGENVTLLCQSQGGMHTFLLTK

SEQ ID NO: 2695 - protein, 34 aa, Homo sapiens
PTLSALPSPVVTSGGNVTIQCDSQVAFDGFILCK

SEQ ID NO: 2696 - protein, 20 aa, Homo sapiens
PTLWAEPGSVITQGSPVTLR

SEQ ID NO: 2697 - protein, 34 aa, Homo sapiens
SYGGQYTCSGAYNLSSEWSAPSDPLDILITGQIR

SEQ ID NO: 2698 - protein, 12 aa, Homo sapiens
AIFSVGPVSPSR

SEQ ID NO: 2699 - protein, 19 aa, Homo sapiens
YQAEFPMSPVTSAHAGTYR

SEQ ID NO: 2700 - protein, 20 aa, Homo sapiens
PTLWAEPGSVITQGSPVTLR

SEQ ID NO: 2701 - protein, 18 aa, Homo sapiens
QPQAGLSQANFTLGPVSR

SEQ ID NO: 2702 - protein, 19 aa, Homo sapiens
ATTVTGTPCQEWAAQEPHR

SEQ ID NO: 2703 - protein, 23 aa, Homo sapiens
CPGSIVGGCVAHPHSWPWQVSLR

SEQ ID NO: 2704 - protein, 16 aa, Homo sapiens
EAQLLVIENEVCNHYK

SEQ ID NO: 2705 - protein, 10 aa, Homo sapiens
FVTWIEGMMR

SEQ ID NO: 2706 - protein, 25 aa, Homo sapiens
GISSTTVTGRTCQSWSSMIPHWHQR

SEQ ID NO: 2707 - protein, 10 aa, Homo sapiens
GSFSTTVTGR

SEQ ID NO: 2708 - protein, 18 aa, Homo sapiens
GTDSCQGDSGGPLVCFEK

SEQ ID NO: 2709 - protein, 21 aa, Homo sapiens
HFCGGTLISPEWVLTAAHCLK

SEQ ID NO: 2710 - protein, 16 aa, Homo sapiens
HSTFIPGTNKWAGLEK

SEQ ID NO: 2711 - protein, 12 aa, Homo sapiens
IPLYYPNAGLTR

SEQ ID NO: 2712 - protein, 26 aa, Homo sapiens
KLFDYCDIPLCASSSFDCGKPQVEPK

SEQ ID NO: 2713 - protein, 19 aa, Homo sapiens
LFDYCDIPLCASSSFDCGK

SEQ ID NO: 2714 - protein, 25 aa, Homo sapiens
LFDYCDIPLCASSSFDCGKPQVEPK

SEQ ID NO: 2715 - protein, 14 aa, Homo sapiens
LFLEPTQADIALLK

SEQ ID NO: 2716 - protein, 18 aa, Homo sapiens
NPDADTGPWCFTMDPSIR

SEQ ID NO: 2717 - protein, 18 aa, Homo sapiens
NPDAEIRPWCYTMDPSVR

SEQ ID NO: 2718 - protein, 18 aa, Homo sapiens
NPDAEISPWCYTMDPNVR

SEQ ID NO: 2719 - protein, 13 aa, Homo sapiens
NPDAVAAPYCYTR

SEQ ID NO: 2720 - protein, 17 aa, Homo sapiens
NPDGDINGPWCYTMNPR

SEQ ID NO: 2721 - protein, 18 aa, Homo sapiens
NPDPVAAPWCYTTDPSVR

SEQ ID NO: 2722 - protein, 13 aa, Homo sapiens
NPDPVAAPYCYTR

SEQ ID NO: 2723 - protein, 18 aa, Homo sapiens
NPDSGKQPWCYTTDPCVR

SEQ ID NO: 2724 - protein, 11 aa, Homo sapiens
PWCYTMDPSVR

SEQ ID NO: 2725 - protein, 12 aa, Homo sapiens
QPWCYTTDPCVR

SEQ ID NO: 2726 - protein, 13 aa, Homo sapiens
RIPLYYPNAGLTR

SEQ ID NO: 2727 - protein, 15 aa, Homo sapiens
TCQAWSSMTPHQHNR

SEQ ID NO: 2728 - protein, 14 aa, Homo sapiens
TCQAWSSMTPHSHS

SEQ ID NO: 2729 - protein, 21 aa, Homo sapiens
TECYITGWGETQGTFGTGLLK

SEQ ID NO: 2730 - protein, 12 aa, Homo sapiens
TPAYYPNAGLIK

SEQ ID NO: 2731 - protein, 16 aa, Homo sapiens
TPENYPNAGLTENYCR

SEQ ID NO: 2732 - protein, 12 aa, Homo sapiens
TPENYPNAGLTR

SEQ ID NO: 2733 - protein, 16 aa, Homo sapiens
TPENYPNDGLTMNYCR

SEQ ID NO: 2734 - protein, 16 aa, Homo sapiens
TPEYYPNAGLIMNYCR

SEQ ID NO: 2735 - protein, 16 aa, Homo sapiens
TTENYPNAGLIMNYCR

SEQ ID NO: 2736 - protein, 12 aa, Homo sapiens
TTEYYPNGGLTR

SEQ ID NO: 2737 - protein, 22 aa, Homo sapiens
VILGAHQEVNLESHVQEIEVSR

SEQ ID NO: 2738 - protein, 16 aa, Homo sapiens
VMPACLPSPDYMVTAR

SEQ ID NO: 2739 - protein, 9 aa, Homo sapiens
YICAEHLAR

SEQ ID NO: 2740 - protein, 8 aa, Homo sapiens
WEYCNLTR

SEQ ID NO: 2741 - protein, 11 aa, Homo sapiens
ALGHLDLSGNR

SEQ ID NO: 2742 - protein, 8 aa, Homo sapiens
CAGPEAVK

SEQ ID NO: 2743 - protein, 17 aa, Homo sapiens
CAGPEAVKGQTLLAVAK

SEQ ID NO: 2744 - protein, 6 aa, Homo sapiens
DCQVFR

SEQ ID NO: 2745 - protein, 21 aa, Homo sapiens
DGFDISGNPWICDQNLSDLYR

SEQ ID NO: 2746 - protein, 10 aa, Homo sapiens
DKMFSQNDTR

SEQ ID NO: 2747 - protein, 10 aa, Homo sapiens
DLLLPQPDLR

SEQ ID NO: 2748 - protein, 16 aa, Homo sapiens
ENQLEVLEVSWLHGLK

SEQ ID NO: 2749 - protein, 7 aa, Homo sapiens
GPLQLER

SEQ ID NO: 2750 - protein, 9 aa, Homo sapiens
GQTLLAVAK

SEQ ID NO: 2751 - protein, 14 aa, Homo sapiens
KLPPGLLANFTLLR

SEQ ID NO: 2752 - protein, 13 aa, Homo sapiens
LHLEGNKLQVLGK

SEQ ID NO: 2753 - protein, 13 aa, Homo sapiens
LPPGLLANFTLLR

SEQ ID NO: 2754 - protein, 20 aa, Homo sapiens
LQELHLSSNGLESLSPEFLR

SEQ ID NO: 2755 - protein, 26 aa, Homo sapiens
LQELHLSSNGLESLSPEFLRPVPQLR

SEQ ID NO: 2756 - protein, 16 aa, Homo sapiens
LQVLGKDLLLPQPDLR

SEQ ID NO: 2757 - protein, 8 aa, Homo sapiens
MFSQNDTR

SEQ ID NO: 2758 - protein, 23 aa, Homo sapiens
NALTGLPPGLFQASATLDTLVLK

SEQ ID NO: 2759 - protein, 31 aa, Homo sapiens
QLDMLDLSNNSLASVPEGLWASLGQPNWDMR

SEQ ID NO: 2760 - protein, 52 aa, Homo sapiens
QLDMLDLSNNSLASVPEGLWASLGQPNWDMRDGFDISGNPWICDQNLSDLYR

SEQ ID NO: 2761 - protein, 46 aa, Homo sapiens
SDHGSSISCQPPAEIPGYLPADTVHLAVEFFNLTHLPANLLQGASK

SEQ ID NO: 2762 - protein, 18 aa, Homo sapiens
TLDLGENQLETLPPDLLR

SEQ ID NO: 2763 - protein, 10 aa, Homo sapiens
VAAGAFQGLR

SEQ ID NO: 2764 - protein, 6 aa, Homo sapiens
WLQAQK

SEQ ID NO: 2765 - protein, 8 aa, Homo sapiens
YLFLNGNK

SEQ ID NO: 2766 - protein, 11 aa, Homo sapiens
YLFLNGNKLAR

SEQ ID NO: 2767 - protein, 16 aa, Homo sapiens
CEEVIPDEEFDPQNSR

SEQ ID NO: 2768 - protein, 23 aa, Homo sapiens
DGTQQAVPLEHPSSPWGLNLTEK

SEQ ID NO: 2769 - protein, 19 aa, Homo sapiens
LNLTHCQDINECLTLGLCK

SEQ ID NO: 2770 - protein, 32 aa, Homo sapiens
NVCGGQCCPGWTTANSTNHCIKPVCEPPCQNR

SEQ ID NO: 2771 - protein, 20 aa, Homo sapiens
VHIHHPPEASVQIHQVAQVR

SEQ ID NO: 2772 - protein, 20 aa, Homo sapiens
ADAVTLDGGFIYEAGLAPYK

SEQ ID NO: 2773 - protein, 17 aa, Homo sapiens
CAFSSQEPYFSYSGAFK

SEQ ID NO: 2774 - protein, 12 aa, Homo sapiens
CGLVPVLAENYK

SEQ ID NO: 2775 - protein, 13 aa, Homo sapiens
CLAENAGDVAFVK

SEQ ID NO: 2776 - protein, 29 aa, Homo sapiens
CNQWSGLSEGSVTCSSASTTEDCIALVLK

SEQ ID NO: 2777 - protein, 14 aa, Homo sapiens
CSTSPLLEACEFLR

SEQ ID NO: 2778 - protein, 14 aa, Homo sapiens
DSPIQCIQAIAENR

SEQ ID NO: 2779 - protein, 18 aa, Homo sapiens
DVTVLQNTDGNNNEAWAK

SEQ ID NO: 2780 - protein, 9 aa, Homo sapiens
EDAIWNLLR

SEQ ID NO: 2781 - protein, 14 aa, Homo sapiens
ESTVFEDLSDEAER

SEQ ID NO: 2782 - protein, 26 aa, Homo sapiens
ESTVFEDLSDEAERDEYELLCPDNTR

SEQ ID NO: 2783 - protein, 16 aa, Homo sapiens
FDEYFSQSCAPGSDPR

SEQ ID NO: 2784 - protein, 11 aa, Homo sapiens
FQLFGSPSGQK

SEQ ID NO: 2785 - protein, 16 aa, Homo sapiens
FQLFGSPSGQKDLLFK

SEQ ID NO: 2786 - protein, 24 aa, Homo sapiens
FQLFGSPSGQKDLLFKDSAIGFSR

SEQ ID NO: 2787 - protein, 18 aa, Homo sapiens
GEADAMSLDGGYVYTAGK

SEQ ID NO: 2788 - protein, 13 aa, Homo sapiens
GGSFQLNELQGLK

SEQ ID NO: 2789 - protein, 19 aa, Homo sapiens
IDSGLYLGSGYFTAIQNLR

SEQ ID NO: 2790 - protein, 14 aa, Homo sapiens
KGGSFQLNELQGLK

SEQ ID NO: 2791 - protein, 12 aa, Homo sapiens
LADFALLCLDGK

SEQ ID NO: 2792 - protein, 13 aa, Homo sapiens
LRPVAAEVYGTER

SEQ ID NO: 2793 - protein, 13 aa, Homo sapiens
NLLFNDNTECLAR

SEQ ID NO: 2794 - protein, 18 aa, Homo sapiens
PFLNWTGPPEPIEAAVAR

SEQ ID NO: 2795 - protein, 16 aa, Homo sapiens
SNLCALCIGDEQGENK

SEQ ID NO: 2796 - protein, 26 aa, Homo sapiens
SQQSSDPDPNCVDRPVEGYLAVAVVR

SEQ ID NO: 2797 - protein, 14 aa, Homo sapiens
SVNGKEDAIWNLLR

SEQ ID NO: 2798 - protein, 14 aa, Homo sapiens
SVQWCAVSQPEATK

SEQ ID NO: 2799 - protein, 19 aa, Homo sapiens
TAGWNIPMGLLFNQTGSCK

SEQ ID NO: 2800 - protein, 12 aa, Homo sapiens
TAGWNVPIGTLR

SEQ ID NO: 2801 - protein, 30 aa, Homo sapiens
TAGWNVPIGTLRPFLNWTGPPEPIEAAVAR

SEQ ID NO: 2802 - protein, 12 aa, Homo sapiens
VVWCAVGEQELR

SEQ ID NO: 2803 - protein, 14 aa, Homo sapiens
YLGPQYVAGITNLK

SEQ ID NO: 2804 - protein, 15 aa, Homo sapiens
YLGPQYVAGITNLKK

SEQ ID NO: 2805 - protein, 9 aa, Homo sapiens
YYGYTGAFR

SEQ ID NO: 2806 - protein, 11 aa, Homo sapiens
AEELSIQVSCR

SEQ ID NO: 2807 - protein, 11 aa, Homo sapiens
ANQQLNFTEAK

SEQ ID NO: 2808 - protein, 20 aa, Homo sapiens
ASFETCSYGWVGDGFVVISR

SEQ ID NO: 2809 - protein, 8 aa, Homo sapiens
DQVETALK

SEQ ID NO: 2810 - protein, 9 aa, Homo sapiens
IMGITLVSK

SEQ ID NO: 2811 - protein, 12 aa, Homo sapiens
KANQQLNFTEAK

SEQ ID NO: 2812 - protein, 9 aa, Homo sapiens
LLGLSLAGK

SEQ ID NO: 2813 - protein, 17 aa, Homo sapiens
LLGLSLAGKDQVETALK

SEQ ID NO: 2814 - protein, 9 aa, Homo sapiens
NGVGVLIWK

SEQ ID NO: 2815 - protein, 21 aa, Homo sapiens
ACDLHLWENQGAGWWHNVSAR

SEQ ID NO: 2816 - protein, 14 aa, Homo sapiens
ALLTNVSSVALGSR

SEQ ID NO: 2817 - protein, 32 aa, Homo sapiens
CLQGDFSGPLGGGNCSLWVGEGLGLPVALPAR

SEQ ID NO: 2818 - protein, 13 aa, Homo sapiens
DFWVLNLTTLQWR

SEQ ID NO: 2819 - protein, 31 aa, Homo sapiens
EAPGFVTDGAGNYSVNGNCEWLIEAPSPQHR

SEQ ID NO: 2820 - protein, 23 aa, Homo sapiens
EVFWAGNCSEAACGAADCEQCTR

SEQ ID NO: 2821 - protein, 24 aa, Homo sapiens
GFIYPMLPGGPGGPGAEDVAVWTR

SEQ ID NO: 2822 - protein, 17 aa, Homo sapiens
GPGTLGWCVHNESCLPR

SEQ ID NO: 2823 - protein, 22 aa, Homo sapiens
GPGTLGWCVHNESCLPRPEQAR

SEQ ID NO: 2824 - protein, 26 aa, Homo sapiens
ILLDFLFLDTECTYDYLFVYDGDSPR

SEQ ID NO: 2825 - protein, 29 aa, Homo sapiens
LLSSPEACNQSGACTWCHGACLSGDQAHR

SEQ ID NO: 2826 - protein, 21 aa, Homo sapiens
MLLHLFSDANYNLLGFNASFR

SEQ ID NO: 2827 - protein, 13 aa, Homo sapiens
TGYTMDNMTGLCR

SEQ ID NO: 2828 - protein, 12 aa, Homo sapiens
TPHDLFSSGLFR

SEQ ID NO: 2829 - protein, 11 aa, Homo sapiens
VNSTELFHVDR

SEQ ID NO: 2830 - protein, 16 aa, Homo sapiens
DAFELWSVASPLIFTR

SEQ ID NO: 2831 - protein, 21 aa, Homo sapiens
DISNYGFPSSVQAIDAAVFYR

SEQ ID NO: 2832 - protein, 9 aa, Homo sapiens
FFGLNVTGK

SEQ ID NO: 2833 - protein, 19 aa, Homo sapiens
FFGLNVTGKPNEETLDMMK

SEQ ID NO: 2834 - protein, 13 aa, Homo sapiens
FYQLPSNQYQSTR

SEQ ID NO: 2835 - protein, 18 aa, Homo sapiens
GNQYWALSGYDILQGYPK

SEQ ID NO: 2836 - protein, 13 aa, Homo sapiens
NYTPQLSEAEVER

SEQ ID NO: 2837 - protein, 12 aa, Homo sapiens
SISGAFPGIESK

SEQ ID NO: 2838 - protein, 10 aa, Homo sapiens
YYAFDLIAQR

SEQ ID NO: 2839 - protein, 15 aa, Homo sapiens
AFALWSAVTPLTFTR

SEQ ID NO: 2840 - protein, 30 aa, Homo sapiens
DGLLAHAFPPGPGIQGDAHFDDDELWSLGK

SEQ ID NO: 2841 - protein, 18 aa, Homo sapiens
FGNADGAACHFPFIFEGR

SEQ ID NO: 2842 - protein, 9 aa, Homo sapiens
FQTFEGDLK

SEQ ID NO: 2843 - protein, 7 aa, Homo sapiens
LFFFSGR

SEQ ID NO: 2844 - protein, 8 aa, Homo sapiens
LFGFCPTR

SEQ ID NO: 2845 - protein, 15 aa, Homo sapiens
LGLGADVAQVTGALR

SEQ ID NO: 2846 - protein, 13 aa, Homo sapiens
LWCATTSNFDSDK

SEQ ID NO: 2847 - protein, 11 aa, Homo sapiens
LYTQDGNADGK

SEQ ID NO: 2848 - protein, 16 aa, Homo sapiens
MFPGVPLDTHDVFQYR

SEQ ID NO: 2849 - protein, 7 aa, Homo sapiens
MLLFSGR

SEQ ID NO: 2850 - protein, 9 aa, Homo sapiens
QLAEEYLYR

SEQ ID NO: 2851 - protein, 16 aa, Homo sapiens
QLSLPETGELDSATLK

SEQ ID NO: 2852 - protein, 12 aa, Homo sapiens
QSTLVLFPGDLR

SEQ ID NO: 2853 - protein, 14 aa, Homo sapiens
QVWVYTGASVLGPR

SEQ ID NO: 2854 - protein, 18 aa, Homo sapiens
SDGLPWCSTTANYDTDDR

SEQ ID NO: 2855 - protein, 11 aa, Homo sapiens
SLGPALLLLQK

SEQ ID NO: 2856 - protein, 10 aa, Homo sapiens
WCATTANYDR

SEQ ID NO: 2857 - protein, 19 aa, Homo sapiens
WHHHNITYWIQNYSEDLPR

SEQ ID NO: 2858 - protein, 21 aa, Homo sapiens
AQEQQSLIHTNQAESHTAVGR

SEQ ID NO: 2859 - protein, 23 aa, Homo sapiens
DTEENLHVLNQTLAEVLFPMDNK

SEQ ID NO: 2860 - protein, 16 aa, Homo sapiens
EVHEQLLSTEQVSDQK

SEQ ID NO: 2861 - protein, 16 aa, Homo sapiens
FNPGAESVVLSNSTLK

SEQ ID NO: 2862 - protein, 18 aa, Homo sapiens
FVLVQENRPTLTDIVELR

SEQ ID NO: 2863 - protein, 13 aa, Homo sapiens
GLTEFVEPIIQIK

SEQ ID NO: 2864 - protein, 11 aa, Homo sapiens
HPFTGDNCTIK

SEQ ID NO: 2865 - protein, 13 aa, Homo sapiens
HSWTIPEDGNSQK

SEQ ID NO: 2866 - protein, 12 aa, Homo sapiens
IDNISLTVNDVR

SEQ ID NO: 2867 - protein, 16 aa, Homo sapiens
IENLTSAVNSLNFIIK

SEQ ID NO: 2868 - protein, 15 aa, Homo sapiens
IFQNDMQETVAQLFK

SEQ ID NO: 2869 - protein, 14 aa, Homo sapiens
INEYALEMEDGLNK

SEQ ID NO: 2870 - protein, 12 aa, Homo sapiens
INNLTVSLEMEK

SEQ ID NO: 2871 - protein, 13 aa, Homo sapiens
KIDNISLTVNDVR

SEQ ID NO: 2872 - protein, 13 aa, Homo sapiens
KPTVNLTTVLIGR

SEQ ID NO: 2873 - protein, 30 aa, Homo sapiens
KSNEQATSLNTVGGTGGIGGVGGTGGVGNR

SEQ ID NO: 2874 - protein, 14 aa, Homo sapiens
LNDSIQTLVNDNQR

SEQ ID NO: 2875 - protein, 13 aa, Homo sapiens
LQNLTLPTNASIK

SEQ ID NO: 2876 - protein, 18 aa, Homo sapiens
LSPTVILDNQVTYVPGGK

SEQ ID NO: 2877 - protein, 13 aa, Homo sapiens
LVEENALAPDFSK

SEQ ID NO: 2878 - protein, 26 aa, Homo sapiens
MSEQLNDLTYDMEILQPLLEQGASLR

SEQ ID NO: 2879 - protein, 13 aa, Homo sapiens
MYQMFNETTSQVR

SEQ ID NO: 2880 - protein, 24 aa, Homo sapiens
NAPAAESVSNNVTEYMSTLHENIK

SEQ ID NO: 2881 - protein, 16 aa, Homo sapiens
NTDNIIYPEEYSSCSR

SEQ ID NO: 2882 - protein, 10 aa, Homo sapiens
SILYYESLNK

SEQ ID NO: 2883 - protein, 29 aa, Homo sapiens
SNEQATSLNTVGGTGGIGGVGGTGGVGNR

SEQ ID NO: 2884 - protein, 25 aa, Homo sapiens
TLHEVLTMCHNASTSVSELNATIPK

SEQ ID NO: 2885 - protein, 19 aa, Homo sapiens
TMTIINNAIDFIQDNYALK

SEQ ID NO: 2886 - protein, 14 aa, Homo sapiens
TQAALSNLTCCIDR

SEQ ID NO: 2887 - protein, 13 aa, Homo sapiens
TVSSLSEDLESTR

SEQ ID NO: 2888 - protein, 19 aa, Homo sapiens
VLTGDALLELNYGQEVWLR

SEQ ID NO: 2889 - protein, 12 aa, Homo sapiens
VMSAEIATTPEK

SEQ ID NO: 2890 - protein, 13 aa, Homo sapiens
VNESVVSIAAQQK

SEQ ID NO: 2891 - protein, 14 aa, Homo sapiens
AADYLHVALDLLER

SEQ ID NO: 2892 - protein, 17 aa, Homo sapiens
DFVNCSTLPALNLASWR

SEQ ID NO: 2893 - protein, 13 aa, Homo sapiens
DYLPLVLGPTAMR

SEQ ID NO: 2894 - protein, 18 aa, Homo sapiens
FCGLPQPETVGQLGTVLR

SEQ ID NO: 2895 - protein, 12 aa, Homo sapiens
FPTDQLTPDQER

SEQ ID NO: 2896 - protein, 10 aa, Homo sapiens
IANVFTNAFR

SEQ ID NO: 2897 - protein, 14 aa, Homo sapiens
FWWENEGVFSMQQR

SEQ ID NO: 2898 - protein, 12 aa, Homo sapiens
IGLDLPALNMQR

SEQ ID NO: 2899 - protein, 13 aa, Homo sapiens
IICDNTGITTVSK

SEQ ID NO: 2900 - protein, 17 aa, Homo sapiens
NLRNMSNQLGLLAVNQR

SEQ ID NO: 2901 - protein, 14 aa, Homo sapiens
NMSNQLGLLAVNQR

SEQ ID NO: 2902 - protein, 10 aa, Homo sapiens
NQADCIPFFR

SEQ ID NO: 2903 - protein, 24 aa, Homo sapiens
NQINALTSFVDASMVYGSEEPLAR

SEQ ID NO: 2904 - protein, 10 aa, Homo sapiens
QNQIAVDEIR

SEQ ID NO: 2905 - protein, 10 aa, Homo sapiens
QALAQISLPR

SEQ ID NO: 2906 - protein, 19 aa, Homo sapiens
RPFNVTDVLTPAQLNVLSK

SEQ ID NO: 2907 - protein, 13 aa, Homo sapiens
SCPACPGSNITIR

SEQ ID NO: 2908 - protein, 24 aa, Homo sapiens
SLMFMQWGQLLDHDLDFTPEPAAR

SEQ ID NO: 2909 - protein, 16 aa, Homo sapiens
SSEMPELTSMHTLLLR

SEQ ID NO: 2910 - protein, 7 aa, Homo sapiens
VFFASWR

SEQ ID NO: 2911 - protein, 14 aa, Homo sapiens
VGPLLACIIGTQFR

SEQ ID NO: 2912 - protein, 12 aa, Homo sapiens
VVLEGGIDPILR

SEQ ID NO: 2913 - protein, 21 aa, Homo sapiens
WLPAEYEDGFSLPYGWTPGVK

SEQ ID NO: 2914 - protein, 18 aa, Homo sapiens
ALLPFDNLHDDPCLLTNR

SEQ ID NO: 2915 - protein, 16 aa, Homo sapiens
ACIGFGGNLVSIQNEK

SEQ ID NO: 2916 - protein, 12 aa, Homo sapiens
ALGGDLASINNK

SEQ ID NO: 2917 - protein, 23 aa, Homo sapiens
CVDAVSPSAVQTAACNQDAESQK

SEQ ID NO: 2918 - protein, 25 aa, Homo sapiens
DSTFSAWTGLNDVNSEHTFLWTDGR

SEQ ID NO: 2919 - protein, 37 aa, Homo sapiens
EGGDLTSIHTIEELDFIISQLGYEPNDELWIGLNDIK

SEQ ID NO: 2920 - protein, 9 aa, Homo sapiens
EGWNFYSNK

SEQ ID NO: 2921 - protein, 44 aa, Homo sapiens
EQAFLTYHMKDSTFSAWTGLNDVNSEHTFLWTDGRGVHYTNWGK

SEQ ID NO: 2922 - protein, 10 aa, Homo sapiens
FEGSESLWNK

SEQ ID NO: 2923 - protein, 23 aa, Homo sapiens
FEGSESLWNKDPLTSVSYQINSK

SEQ ID NO: 2924 - protein, 11 aa, Homo sapiens
FQWHEAETYCK

SEQ ID NO: 2925 - protein, 11 aa, Homo sapiens
FTHWNSDMPGR

SEQ ID NO: 2926 - protein, 24 aa, Homo sapiens
GDPTMSWNDINCEHLNNWICQIQK

SEQ ID NO: 2927 - protein, 11 aa, Homo sapiens
GEDLFFNYGNR

SEQ ID NO: 2928 - protein, 33 aa, Homo sapiens
GNTTLNSFVIPSESDVPTHCPSQWWPYAGHCYK

SEQ ID NO: 2929 - protein, 12 aa, Homo sapiens
GTFQWTIEEEVR

SEQ ID NO: 2930 - protein, 22 aa, Homo sapiens
GYEAMYTLLGNANGATCAFPFK

SEQ ID NO: 2931 - protein, 35 aa, Homo sapiens
HHFYCYMIGHTLSTFAEANQTCNNENAYLTTIEDR

SEQ ID NO: 2932 - protein, 9 aa, Homo sapiens
IFGFMEEER

SEQ ID NO: 2933 - protein, 17 aa, Homo sapiens
IQMYFEWSDGTPVTFTK

SEQ ID NO: 2934 - protein, 11 aa, Homo sapiens
IYGTTDNLCSR

SEQ ID NO: 2935 - protein, 34 aa, Homo sapiens
KGNTTLNSFVIPSESDVPTHCPSQWWPYAGHCYK

SEQ ID NO: 2936 - protein, 8 aa, Homo sapiens
LCLGVPSK

SEQ ID NO: 2937 - protein, 8 aa, Homo sapiens
LFGYCPLK

SEQ ID NO: 2938 - protein, 46 aa, Homo sapiens
LFWLGLTYGSPSEGFTWSDGSPVSYENWAYGEPNNYQNVEYCGELK

SEQ ID NO: 2939 - protein, 28 aa, Homo sapiens
LHNSLIASILDPYSNAFAWLQMETSNER

SEQ ID NO: 2940 - protein, 20 aa, Homo sapiens
MGSSLVSIESAAESSFLSYR

SEQ ID NO: 2941 - protein, 17 aa, Homo sapiens
NDAQSAYFIGLLISLDK

SEQ ID NO: 2942 - protein, 18 aa, Homo sapiens
NDAQSAYFIGLLISLDKK

SEQ ID NO: 2943 - protein, 22 aa, Homo sapiens
NDCVALHASSGFWSNIHCSSYK

SEQ ID NO: 2944 - protein, 8 aa, Homo sapiens
NDTLLGIK

SEQ ID NO: 2945 - protein, 14 aa, Homo sapiens
NFGDLVSIQSESEK

SEQ ID NO: 2946 - protein, 28 aa, Homo sapiens
NVEGTWLWINNSPVSFVNWNTGDPSGER

SEQ ID NO: 2947 - protein, 11 aa, Homo sapiens
NWGQASLECLR

SEQ ID NO: 2948 - protein, 22 aa, Homo sapiens
PEPTPAPQDNPPVTEDGWVIYK

SEQ ID NO: 2949 - protein, 9 aa, Homo sapiens
SCVSLNPGK

SEQ ID NO: 2950 - protein, 17 aa, Homo sapiens
SDGWLWCGTTTDYDTDK

SEQ ID NO: 2951 - protein, 25 aa, Homo sapiens
SDGWLWCGTTTDYDTDKLFGYCPLK

SEQ ID NO: 2952 - protein, 13 aa, Homo sapiens
TAHCNESFYFLCK

SEQ ID NO: 2953 - protein, 12 aa, Homo sapiens
TGIAGGLWDVLK

SEQ ID NO: 2954 - protein, 9 aa, Homo sapiens
TNFWIGLFR

SEQ ID NO: 2955 - protein, 19 aa, Homo sapiens
VWIALNSNLTDNQYTWTDK

SEQ ID NO: 2956 - protein, 12 aa, Homo sapiens
WECKNDTLLGIK

SEQ ID NO: 2957 - protein, 9 aa, Homo sapiens
WENLECVQK

SEQ ID NO: 2958 - protein, 13 aa, Homo sapiens
WVSESQIMSVAFK

SEQ ID NO: 2959 - protein, 12 aa, Homo sapiens
YFWTGLSDIQTK

SEQ ID NO: 2960 - protein, 15 aa, Homo sapiens
YLNWLPGSPSAEPGK

SEQ ID NO: 2961 - protein, 10 aa, Homo sapiens
YTNWAADEPK

SEQ ID NO: 2962 - protein, 10 aa, Homo sapiens
AVGEEVWHSK

SEQ ID NO: 2963 - protein, 18 aa, Homo sapiens
CVVTGEDGSESEATVNVK

SEQ ID NO: 2964 - protein, 26 aa, Homo sapiens
DGEQIEQEEDDEKYIFSDDSSQLTIK

SEQ ID NO: 2965 - protein, 14 aa, Homo sapiens
DGQLLPSSNYSNIK

SEQ ID NO: 2966 - protein, 22 aa, Homo sapiens
EASMEGIVTIVGLKPETTYAVR

SEQ ID NO: 2967 - protein, 22 aa, Homo sapiens
EGEDAVIVCDVVSSLPPTIIWK

SEQ ID NO: 2968 - protein, 11 aa, Homo sapiens
FFLCQVAGDAK

SEQ ID NO: 2969 - protein, 12 aa, Homo sapiens
FIVLSNNYLQIR

SEQ ID NO: 2970 - protein, 12 aa, Homo sapiens
GLGEISAASEFK

SEQ ID NO: 2971 - protein, 48 aa, Homo sapiens
IGQESLEFILVQADTPSSPSIDQVEPYSSTAQVQFDEPEATGGVPILK

SEQ ID NO: 2972 - protein, 27 aa, Homo sapiens
ISVVWNDDSSSTLTIYNANIDDAGIYK

SEQ ID NO: 2973 - protein, 33 aa, Homo sapiens
ITYVENQTAMELEEQVTLTCEASGDPIPSITWR

SEQ ID NO: 2974 - protein, 30 aa, Homo sapiens
IYNTPSASYLEVTPDSENDFGNYNCTAVNR

SEQ ID NO: 2975 - protein, 33 aa, Homo sapiens
LQGPVAVYTWEGNQVNITCEVFAYPSATISWFR

SEQ ID NO: 2976 - protein, 13 aa, Homo sapiens
NDEAEYICIAENK

SEQ ID NO: 2977 - protein, 34 aa, Homo sapiens
SIQYTDAGEYICTASNTIGQDSQSMYLEVQYAPK

SEQ ID NO: 2978 - protein, 33 aa, Homo sapiens
IYDISNDMTVNEGTNVTLTCLATGKPEPSISWR

SEQ ID NO: 2979 - protein, 16 aa, Homo sapiens
LFNGQQGIIIQNFSTR

SEQ ID NO: 2980 - protein, 23 aa, Homo sapiens
SILTVTNVTQEHFGNYTCVAANK

SEQ ID NO: 2981 - protein, 23 aa, Homo sapiens
AVVHGILMGVPVPFPIPEPDGCK

SEQ ID NO: 2982 - protein, 16 aa, Homo sapiens
EVNVSPCPTQPCQLSK

SEQ ID NO: 2983 - protein, 17 aa, Homo sapiens
GQSYSVNVTFTSNIQSK

SEQ ID NO: 2984 - protein, 28 aa, Homo sapiens
LVVEWQLQDDKNQSLFCWEIPVQIVSHL

SEQ ID NO: 2985 - protein, 13 aa, Homo sapiens
CEWLIQAPDPYQR

SEQ ID NO: 2986 - protein, 19 aa, Homo sapiens
EGFSANYSVLQSSVSEDFK

SEQ ID NO: 2987 - protein, 24 aa, Homo sapiens
EGNKPVLFQGNTNPTDVVVAVFPK

SEQ ID NO: 2988 - protein, 11 aa, Homo sapiens
EWIQVDLGLLR

SEQ ID NO: 2989 - protein, 7 aa, Homo sapiens
FEVYGCK

SEQ ID NO: 2990 - protein, 15 aa, Homo sapiens
FVSDYETHGAGFSIR

SEQ ID NO: 2991 - protein, 13 aa, Homo sapiens
FVTAVGTQGAISK

SEQ ID NO: 2992 - protein, 16 aa, Homo sapiens
GPECSQNYTTPSGVIK

SEQ ID NO: 2993 - protein, 16 aa, Homo sapiens
IAPPPVVSSGPFLFIK

SEQ ID NO: 2994 - protein, 21 aa, Homo sapiens
IESPGYLTSPGYPHSYHPSEK

SEQ ID NO: 2995 - protein, 11 aa, Homo sapiens
IGYSNNGSDWK

SEQ ID NO: 2996 - protein, 13 aa, Homo sapiens
IKPATWETGISMR

SEQ ID NO: 2997 - protein, 14 aa, Homo sapiens
IMINFNPHFDLEDR

SEQ ID NO: 2998 - protein, 16 aa, Homo sapiens
LEIWDGFPDVGPHIGR

SEQ ID NO: 2999 - protein, 16 aa, Homo sapiens
LNYPENGWTPGEDSYR

SEQ ID NO: 3000 - protein, 26 aa, Homo sapiens
MSEIILEFESFDLEPDSNPPGGMFCR

SEQ ID NO: 3001 - protein, 17 aa, Homo sapiens
NLSALENYNFELVDGVK

SEQ ID NO: 3002 - protein, 17 aa, Homo sapiens
RGPECSQNYTTPSGVIK

SEQ ID NO: 3003 - protein, 14 aa, Homo sapiens
SFEGNNNYDTPELR

SEQ ID NO: 3004 - protein, 18 aa, Homo sapiens
SSSGILSMVFYTDSAIAK

SEQ ID NO: 3005 - protein, 23 aa, Homo sapiens
TGPIQDHTGDGNFIYSQADENQK

SEQ ID NO: 3006 - protein, 17 aa, Homo sapiens
YDYVEVFDGENENGHFR

SEQ ID NO: 3007 - protein, 11 aa, Homo sapiens
DLELLIQTATR

SEQ ID NO: 3008 - protein, 24 aa, Homo sapiens
EFGDTGEGWETVEMHPAYTEEELR

SEQ ID NO: 3009 - protein, 13 aa, Homo sapiens
EVWEELDGLDPNR

SEQ ID NO: 3010 - protein, 18 aa, Homo sapiens
FHPDTDDVPVPAPAGDQK

SEQ ID NO: 3011 - protein, 10 aa, Homo sapiens
LPEVEVPQHL

SEQ ID NO: 3012 - protein, 10 aa, Homo sapiens
LSQETEALGR

SEQ ID NO: 3013 - protein, 13 aa, Homo sapiens
LVTLEEFLASTQR

SEQ ID NO: 3014 - protein, 18 aa, Homo sapiens
MDAEQDPNVQVDHLNLLK

SEQ ID NO: 3015 - protein, 16 aa, Homo sapiens
QFEHLDPQNQHTFEAR

SEQ ID NO: 3016 - protein, 25 aa, Homo sapiens
TFFILHDINSDGVLDEQELEALFTK

SEQ ID NO: 3017 - protein, 11 aa, Homo sapiens
VNVPGSQAQLK

SEQ ID NO: 3018 - protein, 16 aa, Homo sapiens
YLQEVIDVLETDGHFR

SEQ ID NO: 3019 - protein, 9 aa, Homo sapiens
ALILGELEK

SEQ ID NO: 3020 - protein, 17 aa, Homo sapiens
FWLEQGVDSSVFEALPK

SEQ ID NO: 3021 - protein, 37 aa, Homo sapiens
GLEHLHMDVAVNFSQGALLSPHLHNVCAEAVDAIYTR

SEQ ID NO: 3022 - protein, 27 aa, Homo sapiens
GQSQFQALCFVTQLQHNEIIPSEAMAK

SEQ ID NO: 3023 - protein, 25 aa, Homo sapiens
LPDGQVTEESLQADSDADSISLELR

SEQ ID NO: 3024 - protein, 12 aa, Homo sapiens
QLCLWDEDPYPG

SEQ ID NO: 3025 - protein, 11 aa, Homo sapiens
SYSFDFYVPQR

SEQ ID NO: 3026 - protein, 13 aa, Homo sapiens
YGLSLAWYPCMLK

SEQ ID NO: 3027 - protein, 30 aa, Homo sapiens
DSLYFGIEPVVHVSGLESLVESCFATPTSK

SEQ ID NO: 3028 - protein, 16 aa, Homo sapiens
ELVGGLELFLTNTSCR

SEQ ID NO: 3029 - protein, 21 aa, Homo sapiens
GAGGEDSAGLQGQTLTGGPIR

SEQ ID NO: 3030 - protein, 18 aa, Homo sapiens
GLVLSEDNHTCQVPVLCK

SEQ ID NO: 3031 - protein, 15 aa, Homo sapiens
GVSNGTHVNILFSLK

SEQ ID NO: 3032 - protein, 8 aa, Homo sapiens
HFQVPVFK

SEQ ID NO: 3033 - protein, 12 aa, Homo sapiens
IVASNLVTGLPK

SEQ ID NO: 3034 - protein, 11 aa, Homo sapiens
LLIPVTCEFPR

SEQ ID NO: 3035 - protein, 13 aa, Homo sapiens
LYTISEGYVPNLR

SEQ ID NO: 3036 - protein, 20 aa, Homo sapiens
QACASFNGNCCLWNTTVEVK

SEQ ID NO: 3037 - protein, 12 aa, Homo sapiens
QTPGSSGDFIIR

SEQ ID NO: 3038 - protein, 12 aa, Homo sapiens
TCGTVVDVVNDK

SEQ ID NO: 3039 - protein, 10 aa, Homo sapiens
VLVCGVLDER

SEQ ID NO: 3040 - protein, 26 aa, Homo sapiens
DQNTPVVHPPPTPGSCGHGGVVNISK

SEQ ID NO: 3041 - protein, 35 aa, Homo sapiens
DQNTPVVHPPPTPGSCGHGGVVNISKPSVVQLNWR

SEQ ID NO: 3042 - protein, 14 aa, Homo sapiens
DTISYTELDFELIK

SEQ ID NO: 3043 - protein, 11 aa, Homo sapiens
GFSYLYGAWGR

SEQ ID NO: 3044 - protein, 13 aa, Homo sapiens
GLYWVAPLNTDGR

SEQ ID NO: 3045 - protein, 7 aa, Homo sapiens
LLNLTVR

SEQ ID NO: 3046 - protein, 15 aa, Homo sapiens
LNDTTLQVLNTWYTK

SEQ ID NO: 3047 - protein, 15 aa, Homo sapiens
LYNTLDDLLLYINAR

SEQ ID NO: 3048 - protein, 19 aa, Homo sapiens
LYVYNDGYLLNYDLSVLQK

SEQ ID NO: 3049 - protein, 9 aa, Homo sapiens
PSVVQLNWR

SEQ ID NO: 3050 - protein, 22 aa, Homo sapiens
SLGSGGSVSQLFSNFTGSVDDR

SEQ ID NO: 3051 - protein, 14 aa, Homo sapiens
TEEIFYYYDTNTGK

SEQ ID NO: 3052 - protein, 22 aa, Homo sapiens
VNLTTNTIAVTQTLPNAAYNNR

SEQ ID NO: 3053 - protein, 15 aa, Homo sapiens
DTKTYMLAFDVNDEK

SEQ ID NO: 3054 - protein, 22 aa, Homo sapiens
ENGTISRYVGGQEHFAHLLILR

SEQ ID NO: 3055 - protein, 14 aa, Homo sapiens
EQLGEFYEALDCLR

SEQ ID NO: 3056 - protein, 17 aa, Homo sapiens
EQLGEFYEALDCLRIPK

SEQ ID NO: 3057 - protein, 20 aa, Homo sapiens
EYQTRQDQCIYNTTYLNVQR

SEQ ID NO: 3058 - protein, 27 aa, Homo sapiens
EYQTRQDQCIYNTTYLNVQRENGTISR

SEQ ID NO: 3059 - protein, 12 aa, Homo sapiens
IPKSDVVYTDWK

SEQ ID NO: 3060 - protein, 10 aa, Homo sapiens
NWGLSVYADK

SEQ ID NO: 3061 - protein, 15 aa, Homo sapiens
NWGLSVYADKPETTK

SEQ ID NO: 3062 - protein, 29 aa, Homo sapiens
NWGLSVYADKPETTKEQLGEFYEALDCLR

SEQ ID NO: 3063 - protein, 15 aa, Homo sapiens
QDQCIYNTTYLNVQR

SEQ ID NO: 3064 - protein, 22 aa, Homo sapiens
QDQCIYNTTYLNVQRENGTISR

SEQ ID NO: 3065 - protein, 9 aa, Homo sapiens
SDVVYTDWK

SEQ ID NO: 3066 - protein, 10 aa, Homo sapiens
SDVVYTDWKK

SEQ ID NO: 3067 - protein, 12 aa, Homo sapiens
TYMLAFDVNDEK

SEQ ID NO: 3068 - protein, 27 aa, Homo sapiens
TYMLAFDVNDEKNWGLSVYADKPETTK

SEQ ID NO: 3069 - protein, 15 aa, Homo sapiens
YVGGQEHFAHLLILR

SEQ ID NO: 3070 - protein, 18 aa, Homo sapiens
YVGGQEHFAHLLILRDTK

SEQ ID NO: 3071 - protein, 6 aa, Homo sapiens
CEPLEK

SEQ ID NO: 3072 - protein, 8 aa, Homo sapiens
DKCEPLEK

SEQ ID NO: 3073 - protein, 7 aa, Homo sapiens
KQEEGES

SEQ ID NO: 3074 - protein, 22 aa, Homo sapiens
NEEYNKSVQEIQATFFYFTPNK

SEQ ID NO: 3075 - protein, 30 aa, Homo sapiens
NEEYNKSVQEIQATFFYFTPNKTEDTIFLR

SEQ ID NO: 3076 - protein, 16 aa, Homo sapiens
SVQEIQATFFYFTPNK

SEQ ID NO: 3077 - protein, 24 aa, Homo sapiens
SVQEIQATFFYFTPNKTEDTIFLR

SEQ ID NO: 3078 - protein, 8 aa, Homo sapiens
TEDTIFLR

SEQ ID NO: 3079 - protein, 13 aa, Homo sapiens
TEDTIFLREYQTR

SEQ ID NO: 3080 - protein, 9 aa, Homo sapiens
WFYIASAFR

SEQ ID NO: 3081 - protein, 15 aa, Homo sapiens
WFYIASAFRNEEYNK

SEQ ID NO: 3082 - protein, 10 aa, Homo sapiens
EHVAHLLFLR

SEQ ID NO: 3083 - protein, 13 aa, Homo sapiens
EHVAHLLFLRDTK

SEQ ID NO: 3084 - protein, 17 aa, Homo sapiens
EQLGEFYEALDCLCIPR

SEQ ID NO: 3085 - protein, 20 aa, Homo sapiens
EYQTRQNQCFYNSSYLNVQR

SEQ ID NO: 3086 - protein, 13 aa, Homo sapiens
ITGKWFYIASAFR

SEQ ID NO: 3087 - protein, 10 aa, Homo sapiens
NWGLSFYADK

SEQ ID NO: 3088 - protein, 15 aa, Homo sapiens
NWGLSFYADKPETTK

SEQ ID NO: 3089 - protein, 32 aa, Homo sapiens
NWGLSFYADKPETTKEQLGEFYEALDCLCIPR

SEQ ID NO: 3090 - protein, 15 aa, Homo sapiens
QNQCFYNSSYLNVQR

SEQ ID NO: 3091 - protein, 22 aa, Homo sapiens
QNQCFYNSSYLNVQRENGTVSR

SEQ ID NO: 3092 - protein, 9 aa, Homo sapiens
SDVMYTDWK

SEQ ID NO: 3093 - protein, 10 aa, Homo sapiens
SDVMYTDWKK

SEQ ID NO: 3094 - protein, 12 aa, Homo sapiens
TLMFGSYLDDEK

SEQ ID NO: 3095 - protein, 27 aa, Homo sapiens
TLMFGSYLDDEKNWGLSFYADKPETTK

SEQ ID NO: 3096 - protein, 15 aa, Homo sapiens
YEGGREHVAHLLFLR

SEQ ID NO: 3097 - protein, 18 aa, Homo sapiens
YEGGREHVAHLLFLRDTK

SEQ ID NO: 3098 - protein, 17 aa, Homo sapiens
DKLVEEGTNVTICYVSR

SEQ ID NO: 3099 - protein, 18 aa, Homo sapiens
GTNIYCEASQGNVSEGMK

SEQ ID NO: 3100 - protein, 17 aa, Homo sapiens
IETSNVIWVGNYSTTVK

SEQ ID NO: 3101 - protein, 30 aa, Homo sapiens
ILFYNVVVENLDKPSSSELHSIPAPANSTK

SEQ ID NO: 3102 - protein, 9 aa, Homo sapiens
LPLTPVSLK

SEQ ID NO: 3103 - protein, 15 aa, Homo sapiens
LVEEGTNVTICYVSR

SEQ ID NO: 3104 - protein, 9 aa, Homo sapiens
MMQYNVSIK

SEQ ID NO: 3105 - protein, 13 aa, Homo sapiens
NIQNNVSCYLEGK

SEQ ID NO: 3106 - protein, 16 aa, Homo sapiens
NNFTYLCQIELHGEGK

SEQ ID NO: 3107 - protein, 17 aa, Homo sapiens
NVGPNTTSTVISTDAFR

SEQ ID NO: 3108 - protein, 21 aa, Homo sapiens
NVGPNTTSTVISTDAFRPGVR

SEQ ID NO: 3109 - protein, 26 aa, Homo sapiens
NWCNWQITQDSQETYNFTLIAENYLR

SEQ ID NO: 3110 - protein, 11 aa, Homo sapiens
SVNILFNLTHR

SEQ ID NO: 3111 - protein, 32 aa, Homo sapiens
VTTPDEHSSMLIHILLPMVFCVLLIMVMCYLK

SEQ ID NO: 3112 - protein, 29 aa, Homo sapiens
VYLMNPFSVNFENVNATNAIMTWKVHSIR

SEQ ID NO: 3113 - protein, 23 aa, Homo sapiens
WNQVLHWSWESELPLECATHFVR

SEQ ID NO: 3114 - protein, 24 aa, Homo sapiens
WSEWSGQNFTTLEAAPSEAPDVWR

SEQ ID NO: 3115 - protein, 19 aa, Homo sapiens
ECIWTITVPEGQTVSLSFR

SEQ ID NO: 3116 - protein, 37 aa, Homo sapiens
FCGDAVPGSISSEGNELLVQFVSDLSVTADGFSASYK

SEQ ID NO: 3117 - protein, 10 aa, Homo sapiens
FDLEPDTYCR

SEQ ID NO: 3118 - protein, 19 aa, Homo sapiens
GESGYVASEGFPNLYPPNK

SEQ ID NO: 3119 - protein, 9 aa, Homo sapiens
GFLLWYSGR

SEQ ID NO: 3120 - protein, 26 aa, Homo sapiens
GPVLPPESFVVLHRPNQDQILTNLSK

SEQ ID NO: 3121 - protein, 14 aa, Homo sapiens
GVSYLLMGQVEENR

SEQ ID NO: 3122 - protein, 14 aa, Homo sapiens
PAPLVAPGNQVTLR

SEQ ID NO: 3123 - protein, 15 aa, Homo sapiens
TEESPSAPDAPTCPK

SEQ ID NO: 3124 - protein, 16 aa, Homo sapiens
TGGLDLPSPPTGASLK

SEQ ID NO: 3125 - protein, 20 aa, Homo sapiens
TGTLQSNFCASSLVVTATVK

SEQ ID NO: 3126 - protein, 11 aa, Homo sapiens
VFDLELHPACR

SEQ ID NO: 3127 - protein, 16 aa, Homo sapiens
YDALEVFAGSGTSGQR

SEQ ID NO: 3128 - protein, 16 aa, Homo sapiens
YDSVSVFNGAVSDDSR

SEQ ID NO: 3129 - protein, 27 aa, Homo sapiens
ADEYQPPDGGSLVEVYLLDTSIQSDHR

SEQ ID NO: 3130 - protein, 13 aa, Homo sapiens
AGVVLVTAAGNFR

SEQ ID NO: 3131 - protein, 15 aa, Homo sapiens
AHNAFGGEGVYAIAR

SEQ ID NO: 3132 - protein, 24 aa, Homo sapiens
CCLLPQANCSVHTAPPAEASMGTR

SEQ ID NO: 3133 - protein, 38 aa, Homo sapiens
DDACLYSPASAPEVITVGATNAQDQPVTLGTLGTNFGR

SEQ ID NO: 3134 - protein, 13 aa, Homo sapiens
DVINEAWFPEDQR

SEQ ID NO: 3135 - protein, 46 aa, Homo sapiens
EHGIPAPQEQVTVACEEGWTLTGCSALPGTSHVLGAYAVDNTCVVR

SEQ ID NO: 3136 - protein, 14 aa, Homo sapiens
GTVSGTLIGLEFIR

SEQ ID NO: 3137 - protein, 22 aa, Homo sapiens
SQLVQPVGPLVVLLPLAGGYSR

SEQ ID NO: 3138 - protein, 16 aa, Homo sapiens
VMVTDFENVPEEDGTR

SEQ ID NO: 3139 - protein, 16 aa, Homo sapiens
EKEDPEPSTDGTYVWK

SEQ ID NO: 3140 - protein, 26 aa, Homo sapiens
FGLNTVLTTDNSDLFINSIGIVPSVR

SEQ ID NO: 3141 - protein, 11 aa, Homo sapiens
FLNEMIAPVMR

SEQ ID NO: 3142 - protein, 11 aa, Homo sapiens
GELNTSIFSSR

SEQ ID NO: 3143 - protein, 15 aa, Homo sapiens
GELNTSIFSSRPIDK

SEQ ID NO: 3144 - protein, 18 aa, Homo sapiens
IAIIGAGIGGTSAAYYLR

SEQ ID NO: 3145 - protein, 6 aa, Homo sapiens
IDLFER

SEQ ID NO: 3146 - protein, 30 aa, Homo sapiens
KMSNITFLNFDPPIEEFHQYYQHIVTTLVK

SEQ ID NO: 3147 - protein, 26 aa, Homo sapiens
LATMMVQGQEYEAGGSVIHPLNLHMK

SEQ ID NO: 3148 - protein, 10 aa, Homo sapiens
LFLSYDYAVK

SEQ ID NO: 3149 - protein, 16 aa, Homo sapiens
LLHALGGDDFLGMLNR

SEQ ID NO: 3150 - protein, 11 aa, Homo sapiens
MHMWVEDVLDK

SEQ ID NO: 3151 - protein, 23 aa, Homo sapiens
MMVQGQEYEAGGSVIHPLNLHMK

SEQ ID NO: 3152 - protein, 29 aa, Homo sapiens
MSNITFLNFDPPIEEFHQYYQHIVTTLVK

SEQ ID NO: 3153 - protein, 13 aa, Homo sapiens
MYEVVYQIGTETR

SEQ ID NO: 3154 - protein, 15 aa, Homo sapiens
SDFYDIVLVATPLNR

SEQ ID NO: 3155 - protein, 14 aa, Homo sapiens
SNLISGSVMYIEEK

SEQ ID NO: 3156 - protein, 8 aa, Homo sapiens
TLLETLQK

SEQ ID NO: 3157 - protein, 33 aa, Homo sapiens
VNYGQSTDINAFVGAVSLSCSDSGLWAVEGGNK

SEQ ID NO: 3158 - protein, 16 aa, Homo sapiens
WNGHTDMIDQDGLYEK

SEQ ID NO: 3159 - protein, 13 aa, Homo sapiens
YQSHDYAFSSVEK

SEQ ID NO: 3160 - protein, 16 aa, Homo sapiens
AAQGLLACGVAQGALR

SEQ ID NO: 3161 - protein, 15 aa, Homo sapiens
ALASECAQHLSLPLR

SEQ ID NO: 3162 - protein, 23 aa, Homo sapiens
TLGWCDVGYNFLIGEDGLVYEGR

SEQ ID NO: 3163 - protein, 19 aa, Homo sapiens
TLSPGNQLYHLIQNWPHYR

SEQ ID NO: 3164 - protein, 23 aa, Homo sapiens
YVVVSHTAGSSCNTPASCQQQAR

SEQ ID NO: 3165 - protein, 14 aa, Homo sapiens
AGLLRPDYALLGHR

SEQ ID NO: 3166 - protein, 24 aa, Homo sapiens
ASLLTMAFLNGALDGVILGDYLSR

SEQ ID NO: 3167 - protein, 20 aa, Homo sapiens
DGSPDVTTADIGANTPDATK

SEQ ID NO: 3168 - protein, 9 aa, Homo sapiens
DTLPSCAVR

SEQ ID NO: 3169 - protein, 15 aa, Homo sapiens
EFTEAFLGCPAIHPR

SEQ ID NO: 3170 - protein, 32 aa, Homo sapiens
EGKEYGVVLAPDGSTVAVEPLLAGLEAGLQGR

SEQ ID NO: 3171 - protein, 29 aa, Homo sapiens
EYGVVLAPDGSTVAVEPLLAGLEAGLQGR

SEQ ID NO: 3172 - protein, 13 aa, Homo sapiens
GCPDVQASLPDAK

SEQ ID NO: 3173 - protein, 21 aa, Homo sapiens
GFGVAIVGNYTAALPTEAALR

SEQ ID NO: 3174 - protein, 23 aa, Homo sapiens
GSQTQSHPDLGTEGCWDQLSAPR

SEQ ID NO: 3175 - protein, 18 aa, Homo sapiens
HTASAWLMSAPNSGPHNR

SEQ ID NO: 3176 - protein, 25 aa, Homo sapiens
LEPVHLQLQCMSQEQLAQVAANATK

SEQ ID NO: 3177 - protein, 40 aa, Homo sapiens
LEPVHLQLQCMSQEQLAQVAANATKEFTEAFLGCPAIHPR

SEQ ID NO: 3178 - protein, 26 aa, Homo sapiens
LLQLPLGFLYVHHTYVPAPPCTDFTR

SEQ ID NO: 3179 - protein, 30 aa, Homo sapiens
LYHFLLGAWSLNATELDPCPLSPELLGLTK

SEQ ID NO: 3180 - protein, 17 aa, Homo sapiens
PSLSHLLSQYYGAGVAR

SEQ ID NO: 3181 - protein, 25 aa, Homo sapiens
QNGAALTSASILAQQVWGTLVLLQR

SEQ ID NO: 3182 - protein, 31 aa, Homo sapiens
RVINLPLDSMAAPWETGDTFPDVVAIAPDVR

SEQ ID NO: 3183 - protein, 24 aa, Homo sapiens
SPPTMVDSLLAVTLAGNLGLTFLR

SEQ ID NO: 3184 - protein, 13 aa, Homo sapiens
TDCPGDALFDLLR

SEQ ID NO: 3185 - protein, 8 aa, Homo sapiens
TFTLLDPK

SEQ ID NO: 3186 - protein, 22 aa, Homo sapiens
TPEPRPSLSHLLSQYYGAGVAR

SEQ ID NO: 3187 - protein, 10 aa, Homo sapiens
TWPHFTATVK

SEQ ID NO: 3188 - protein, 30 aa, Homo sapiens
VINLPLDSMAAPWETGDTFPDVVAIAPDVR

SEQ ID NO: 3189 - protein, 7 aa, Homo sapiens
WGAAPYR

SEQ ID NO: 3190 - protein, 27 aa, Homo sapiens
YHQDTQGWGDIGYSFVVGSDGYVYEGR

SEQ ID NO: 3191 - protein, 11 aa, Homo sapiens
ADEGWYWCGVK

SEQ ID NO: 3192 - protein, 10 aa, Homo sapiens
AFVNCDENSR

SEQ ID NO: 3193 - protein, 18 aa, Homo sapiens
AIQDPRLFAEEKAVADTR

SEQ ID NO: 3194 - protein, 26 aa, Homo sapiens
ANLTNFPENGTFVVNIAQLSQDDSGR

SEQ ID NO: 3195 - protein, 28 aa, Homo sapiens
ANLTNFPENGTFVVNIAQLSQDDSGRYK

SEQ ID NO: 3196 - protein, 8 aa, Homo sapiens
CGLGINSR

SEQ ID NO: 3197 - protein, 12 aa, Homo sapiens
CPLLVDSEGWVK

SEQ ID NO: 3198 - protein, 16 aa, Homo sapiens
DAGFYWCLTNGDTLWR

SEQ ID NO: 3199 - protein, 12 aa, Homo sapiens
DGSFSVVITGLR

SEQ ID NO: 3200 - protein, 16 aa, Homo sapiens
GGCITLISSEGYVSSK

SEQ ID NO: 3201 - protein, 21 aa, Homo sapiens
GLSFDVSLEVSQGPGLLNDTK

SEQ ID NO: 3202 - protein, 18 aa, Homo sapiens
GSVTFHCALGPEVANVAK

SEQ ID NO: 3203 - protein, 15 aa, Homo sapiens
GVAGGSVAVLCPYNR

SEQ ID NO: 3204 - protein, 9 aa, Homo sapiens
IIEGEPNLK

SEQ ID NO: 3205 - protein, 23 aa, Homo sapiens
IIEGEPNLKVPGNVTAVLGETLK

SEQ ID NO: 3206 - protein, 8 aa, Homo sapiens
ILLNPQDK

SEQ ID NO: 3207 - protein, 19 aa, Homo sapiens
LDIQGTGQLLFSVVINQLR

SEQ ID NO: 3208 - protein, 19 aa, Homo sapiens
LSDAGQYLCQAGDDSNSNK

SEQ ID NO: 3209 - protein, 20 aa, Homo sapiens
LSDAGQYLCQAGDDSNSNKK

SEQ ID NO: 3210 - protein, 22 aa, Homo sapiens
LSLLEEPGNGTFTVILNQLTSR

SEQ ID NO: 3211 - protein, 11 aa, Homo sapiens
LVSLTLNLVTR

SEQ ID NO: 3212 - protein, 19 aa, Homo sapiens
NADLQVLKPEPELVYEDLR

SEQ ID NO: 3213 - protein, 18 aa, Homo sapiens
QGHFYGETAAVYVAVEER

SEQ ID NO: 3214 - protein, 23 aa, Homo sapiens
QIGLYPVLVIDSSGYVNPNYTGR

SEQ ID NO: 3215 - protein, 16 aa, Homo sapiens
QSSGENCDVVVNTLGK

SEQ ID NO: 3216 - protein, 30 aa, Homo sapiens
SPIFGPEEVNSVEGNSVSITCYYPPTSVNR

SEQ ID NO: 3217 - protein, 9 aa, Homo sapiens
TVTINCPFK

SEQ ID NO: 3218 - protein, 14 aa, Homo sapiens
VPGNVTAVLGETLK

SEQ ID NO: 3219 - protein, 22 aa, Homo sapiens
VPGNVTAVLGETLKVPCHFPCK

SEQ ID NO: 3220 - protein, 8 aa, Homo sapiens
VYTVDLGR

SEQ ID NO: 3221 - protein, 18 aa, Homo sapiens
WNNTGCQALPSQDEGPSK

SEQ ID NO: 3222 - protein, 32 aa, Homo sapiens
YLCGAHSDGQLQEGSPIQAWQLFVNEESTIPR

SEQ ID NO: 3223 - protein, 12 aa, Homo sapiens
YWCLWEGAQNGR

SEQ ID NO: 3224 - protein, 29 aa, Homo sapiens
HLSASMGGSVEIPFSFYYPWELATAPDVR

SEQ ID NO: 3225 - protein, 10 aa, Homo sapiens
LFLNWTEGQK

SEQ ID NO: 3226 - protein, 12 aa, Homo sapiens
SPQNETLYSVLK

SEQ ID NO: 3227 - protein, 12 aa, Homo sapiens
APWCHTTNSQVR

SEQ ID NO: 3228 - protein, 19 aa, Homo sapiens
ATTVTGTPCQDWAAQEPHR

SEQ ID NO: 3229 - protein, 10 aa, Homo sapiens
CEEDEEFTCR

SEQ ID NO: 3230 - protein, 34 aa, Homo sapiens
CSGTEASVVAPPPVVLLPDVETPSEEDCMFGNGK

SEQ ID NO: 3231 - protein, 16 aa, Homo sapiens
CTTPPPSSGPTYQCLK

SEQ ID NO: 3232 - protein, 10 aa, Homo sapiens
EAQLPVIENK

SEQ ID NO: 3233 - protein, 13 aa, Homo sapiens
ELRPWCFTTDPNK

SEQ ID NO: 3234 - protein, 14 aa, Homo sapiens
ELRPWCFTTDPNKR

SEQ ID NO: 3235 - protein, 25 aa, Homo sapiens
FGMHFCGGTLISPEWVLTAAHCLEK

SEQ ID NO: 3236 - protein, 17 aa, Homo sapiens
FSPATHPSEGLEENYCR

SEQ ID NO: 3237 - protein, 36 aa, Homo sapiens
FSPATHPSEGLEENYCRNPDNDPQGPWCYTTDPEKR

SEQ ID NO: 3238 - protein, 10 aa, Homo sapiens
FVTWIEGVMR

SEQ ID NO: 3239 - protein, 25 aa, Homo sapiens
GNVAVTVSGHTCQHWSAQTPHTHNR

SEQ ID NO: 3240 - protein, 33 aa, Homo sapiens
GNVAVTVSGHTCQHWSAQTPHTHNRTPENFPCK

SEQ ID NO: 3241 - protein, 12 aa, Homo sapiens
GPWCFTTDPSVR

SEQ ID NO: 3242 - protein, 10 aa, Homo sapiens
GTSSTTTTGK

SEQ ID NO: 3243 - protein, 11 aa, Homo sapiens
HSIFTPETNPR

SEQ ID NO: 3244 - protein, 27 aa, Homo sapiens
ISKTMSGLECQAWDSQSPHAHGYIPSK

SEQ ID NO: 3245 - protein, 35 aa, Homo sapiens
KCSGTEASVVAPPPVVLLPDVETPSEEDCMFGNGK

SEQ ID NO: 3246 - protein, 20 aa, Homo sapiens
KLYDYCDVPQCAAPSFDCGK

SEQ ID NO: 3247 - protein, 26 aa, Homo sapiens
KLYDYCDVPQCAAPSFDCGKPQVEPK

SEQ ID NO: 3248 - protein, 14 aa, Homo sapiens
KQLGAGSIEECAAK

SEQ ID NO: 3249 - protein, 7 aa, Homo sapiens
LFLEPTR

SEQ ID NO: 3250 - protein, 10 aa, Homo sapiens
LSSPAVITDK

SEQ ID NO: 3251 - protein, 19 aa, Homo sapiens
LYDYCDVPQCAAPSFDCGK

SEQ ID NO: 3252 - protein, 25 aa, Homo sapiens
LYDYCDVPQCAAPSFDCGKPQVEPK

SEQ ID NO: 3253 - protein, 8 aa, Homo sapiens
NLDENYCR

SEQ ID NO: 3254 - protein, 18 aa, Homo sapiens
NPDADKGPWCFTTDPSVR

SEQ ID NO: 3255 - protein, 17 aa, Homo sapiens
NPDGDVGGPWCYTTNPR

SEQ ID NO: 3256 - protein, 18 aa, Homo sapiens
NPDNDPQGPWCYTTDPEK

SEQ ID NO: 3257 - protein, 19 aa, Homo sapiens
NPDNDPQGPWCYTTDPEKR

SEQ ID NO: 3258 - protein, 13 aa, Homo sapiens
QLGAGSIEECAAK

SEQ ID NO: 3259 - protein, 23 aa, Homo sapiens
QLGAGSIEECAAKCEEDEEFTCR

SEQ ID NO: 3260 - protein, 20 aa, Homo sapiens
RATTVTGTPCQDWAAQEPHR

SEQ ID NO: 3261 - protein, 9 aa, Homo sapiens
RWELCDIPR

SEQ ID NO: 3262 - protein, 21 aa, Homo sapiens
TECFITGWGETQGTFGAGLLK

SEQ ID NO: 3263 - protein, 24 aa, Homo sapiens
TMSGLECQAWDSQSPHAHGYIPSK

SEQ ID NO: 3264 - protein, 8 aa, Homo sapiens
TPENFPCK

SEQ ID NO: 3265 - protein, 16 aa, Homo sapiens
TPENYPNAGLTMNYCR

SEQ ID NO: 3266 - protein, 22 aa, Homo sapiens
VILGAHQEVNLEPHVQEIEVSR

SEQ ID NO: 3267 - protein, 16 aa, Homo sapiens
VIPACLPSPNYVVADR

SEQ ID NO: 3268 - protein, 31 aa, Homo sapiens
VQSTELCAGHLAGGTDSCQGDSGGPLVCFEK

SEQ ID NO: 3269 - protein, 19 aa, Homo sapiens
VVGGCVAHPHSWPWQVSLR

SEQ ID NO: 3270 - protein, 7 aa, Homo sapiens
VYLSECK

SEQ ID NO: 3271 - protein, 8 aa, Homo sapiens
WELCDIPR

SEQ ID NO: 3272 - protein, 7 aa, Homo sapiens
WEYCNLK

SEQ ID NO: 3273 - protein, 24 aa, Homo sapiens
YDYCDILECEEECMHCSGENYDGK

SEQ ID NO: 3274 - protein, 7 aa, Homo sapiens
YEFLNGR

SEQ ID NO: 3275 - protein, 17 aa, Homo sapiens
DKYILQGVTSWGLGCAR

SEQ ID NO: 3276 - protein, 15 aa, Homo sapiens
YILQGVTSWGLGCAR

SEQ ID NO: 3277 - protein, 7 aa, Homo sapiens
DVVLFEK

SEQ ID NO: 3278 - protein, 11 aa, Homo sapiens
EQQCVIMAENR

SEQ ID NO: 3279 - protein, 12 aa, Homo sapiens
AGALQLLLVGDK

SEQ ID NO: 3280 - protein, 22 aa, Homo sapiens
AGALQLLLVGDKVPHDLDMLLR

SEQ ID NO: 3281 - protein, 11 aa, Homo sapiens
ALELVKQEGLR

SEQ ID NO: 3282 - protein, 20 aa, Homo sapiens
ATYFGSIVLLSPAVIDSPLK

SEQ ID NO: 3283 - protein, 11 aa, Homo sapiens
AVEPQLQEEER

SEQ ID NO: 3284 - protein, 14 aa, Homo sapiens
DPVASTSNLDMDFR

SEQ ID NO: 3285 - protein, 12 aa, Homo sapiens
EGHFYYNISEVK

SEQ ID NO: 3286 - protein, 15 aa, Homo sapiens
FLEQELETITIPDLR

SEQ ID NO: 3287 - protein, 29 aa, Homo sapiens
FLLNQQICPVLYHAGTVLLNSLLDTVPVR

SEQ ID NO: 3288 - protein, 23 aa, Homo sapiens
FRIYSNHSALESLALIPLQAPLK

SEQ ID NO: 3289 - protein, 9 aa, Homo sapiens
GAFFPLTER

SEQ ID NO: 3290 - protein, 16 aa, Homo sapiens
GAFFPLTERNWSLPNR

SEQ ID NO: 3291 - protein, 14 aa, Homo sapiens
GKEGHFYYNISEVK

SEQ ID NO: 3292 - protein, 34 aa, Homo sapiens
GVQIPLPEGINFVHEVVTNHAGFLTIGADLHFAK

SEQ ID NO: 3293 - protein, 21 aa, Homo sapiens
IYSNHSALESLALIPLQAPLK

SEQ ID NO: 3294 - protein, 15 aa, Homo sapiens
KVYDFLSTFITSGMR

SEQ ID NO: 3295 - protein, 11 aa, Homo sapiens
LQITNASLGLR

SEQ ID NO: 3296 - protein, 10 aa, Homo sapiens
MHAAFGGTFK

SEQ ID NO: 3297 - protein, 14 aa, Homo sapiens
MKVSNVSCQASVSR

SEQ ID NO: 3298 - protein, 12 aa, Homo sapiens
MLQITNASLGLR

SEQ ID NO: 3299 - protein, 20 aa, Homo sapiens
MVYVAFSEFFFDSAMESYFR

SEQ ID NO: 3300 - protein, 23 aa, Homo sapiens
QLLYWFFYDGGYINASAEGVSIR

SEQ ID NO: 3301 - protein, 15 aa, Homo sapiens
SSVDELVGIDYSLMK

SEQ ID NO: 3302 - protein, 29 aa, Homo sapiens
SSVDELVGIDYSLMKDPVASTSNLDMDFR

SEQ ID NO: 3303 - protein, 7 aa, Homo sapiens
TGLELSR

SEQ ID NO: 3304 - protein, 14 aa, Homo sapiens
TMLQIGVMPMLNER

SEQ ID NO: 3305 - protein, 10 aa, Homo sapiens
VPHDLDMLLR

SEQ ID NO: 3306 - protein, 12 aa, Homo sapiens
VSNVSCQASVSR

SEQ ID NO: 3307 - protein, 31 aa, Homo sapiens
VTELQLTSSELDFQPQQELMLQITNASLGLR

SEQ ID NO: 3308 - protein, 14 aa, Homo sapiens
VYDFLSTFITSGMR

SEQ ID NO: 3309 - protein, 17 aa, Homo sapiens
AKLIALTLLGMGLALFR

SEQ ID NO: 3310 - protein, 14 aa, Homo sapiens
EVQPVELPNCNLVK

SEQ ID NO: 3311 - protein, 32 aa, Homo sapiens
FDVSSFNPHGISTFTDEDNAMYLLVVNHPDAK

SEQ ID NO: 3312 - protein, 29 aa, Homo sapiens
GIETGSEDLEILPNGLAFISSGLKYPGIK

SEQ ID NO: 3313 - protein, 10 aa, Homo sapiens
HANWTLTPLK

SEQ ID NO: 3314 - protein, 16 aa, Homo sapiens
IFFYDSENPPASEVLR

SEQ ID NO: 3315 - protein, 22 aa, Homo sapiens
ILLMDLNEEDPTVLELGITGSK

SEQ ID NO: 3316 - protein, 10 aa, Homo sapiens
IQNILTEEPK

SEQ ID NO: 3317 - protein, 32 aa, Homo sapiens
IQNILTEEPKVTQVYAENGTVLQGSTVASVYK

SEQ ID NO: 3318 - protein, 34 aa, Homo sapiens
IQNILTEEPKVTQVYAENGTVLQGSTVASVYKGK

SEQ ID NO: 3319 - protein, 15 aa, Homo sapiens
LIALTLLGMGLALFR

SEQ ID NO: 3320 - protein, 9 aa, Homo sapiens
LLIGTVFHK

SEQ ID NO: 3321 - protein, 52 aa, Homo sapiens
LLPNLNDIVAVGPEHFYGTNDHYFLDPYLQSWEMYLGLAWSYVVYYSPSEVR

SEQ ID NO: 3322 - protein, 9 aa, Homo sapiens
NHQSSYQTR

SEQ ID NO: 3323 - protein, 9 aa, Homo sapiens
SFNPNSPGK

SEQ ID NO: 3324 - protein, 30 aa, Homo sapiens
SLDFNTLVDNISVDPETGDLWVGCHPNGMK

SEQ ID NO: 3325 - protein, 7 aa, Homo sapiens
STVELFK

SEQ ID NO: 3326 - protein, 19 aa, Homo sapiens
STVELFKFQEEEKSLLHLK

SEQ ID NO: 3327 - protein, 19 aa, Homo sapiens
STVELFKFQEEEKSLLHLK

SEQ ID NO: 3328 - protein, 22 aa, Homo sapiens
VTQVYAENGTVLQGSTVASVYK

SEQ ID NO: 3329 - protein, 24 aa, Homo sapiens
VTQVYAENGTVLQGSTVASVYKGK

SEQ ID NO: 3330 - protein, 19 aa, Homo sapiens
VVAEGFDFANGINISPDGK

SEQ ID NO: 3331 - protein, 30 aa, Homo sapiens
VVAEGFDFANGINISPDGKYVYIAELLAHK

SEQ ID NO: 3332 - protein, 11 aa, Homo sapiens
YVYIAELLAHK

SEQ ID NO: 3333 - protein, 17 aa, Homo sapiens
YVYIAELLAHKIHVYEK

SEQ ID NO: 3334 - protein, 19 aa, Homo sapiens
DHYFTNSLLSFFEMILDLR

SEQ ID NO: 3335 - protein, 14 aa, Homo sapiens
ELFNPHGISIFIDK

SEQ ID NO: 3336 - protein, 38 aa, Homo sapiens
EVEPVEPENCHLIEELESGSEDIDILPSGLAFISSGLK

SEQ ID NO: 3337 - protein, 10 aa, Homo sapiens
HDNWDLTQLK

SEQ ID NO: 3338 - protein, 12 aa, Homo sapiens
IFLMDLNEQNPR

SEQ ID NO: 3339 - protein, 16 aa, Homo sapiens
LLNYNPEDPPGSEVLR

SEQ ID NO: 3340 - protein, 17 aa, Homo sapiens
SVNDIVVLGPEQFYATR

SEQ ID NO: 3341 - protein, 30 aa, Homo sapiens
VIQLGTLVDNLTVDPATGDILAGCHPNPMK

SEQ ID NO: 3342 - protein, 24 aa, Homo sapiens
VSTVYANNGSVLQGTSVASVYHGK

SEQ ID NO: 3343 - protein, 14 aa, Homo sapiens
YPGMPNFAPDEPGK

SEQ ID NO: 3344 - protein, 10 aa, Homo sapiens
YVYVADVAAK

SEQ ID NO: 3345 - protein, 12 aa, Homo sapiens
DTEDQEDQVDPR

SEQ ID NO: 3346 - protein, 15 aa, Homo sapiens
EIFQNVDDTLAFWSK

SEQ ID NO: 3347 - protein, 20 aa, Homo sapiens
ELNQAGQETLVTGWGYHSSR

SEQ ID NO: 3348 - protein, 10 aa, Homo sapiens
EVFVHPNYSK

SEQ ID NO: 3349 - protein, 25 aa, Homo sapiens
EVSFLNCSLDNGGCTHYCLEEVGWR

SEQ ID NO: 3350 - protein, 13 aa, Homo sapiens
GDSPWQVVLLDSK

SEQ ID NO: 3351 - protein, 38 aa, Homo sapiens
HVDGDQCLVLPLEHPCASLCCGHGTCIDGIGSFSCDCR

SEQ ID NO: 3352 - protein, 30 aa, Homo sapiens
IPVVPHNECSEVMSNMVSENMLCAGILGDR

SEQ ID NO: 3353 - protein, 24 aa, Homo sapiens
LACGAVLIHPSWVLTAAHCMDESK

SEQ ID NO: 3354 - protein, 25 aa, Homo sapiens
LACGAVLIHPSWVLTAAHCMDESKK

SEQ ID NO: 3355 - protein, 13 aa, Homo sapiens
LGDDLLQCHPAVK

SEQ ID NO: 3356 - protein, 14 aa, Homo sapiens
RGDSPWQVVLLDSK

SEQ ID NO: 3357 - protein, 35 aa, Homo sapiens
STTDNDIALLHLAQPATLSQTIVPICLPDSGLAER

SEQ ID NO: 3358 - protein, 8 aa, Homo sapiens
TFVLNFIK

SEQ ID NO: 3359 - protein, 8 aa, Homo sapiens
WELDLDIK

SEQ ID NO: 3360 - protein, 10 aa, Homo sapiens
YLDWIHGHIR

SEQ ID NO: 3361 - protein, 26 aa, Homo sapiens
ALWQADTQVTSGVVTFTLQQLNAYNR

SEQ ID NO: 3362 - protein, 13 aa, Homo sapiens
CFLGCELPPEGSR

SEQ ID NO: 3363 - protein, 44 aa, Homo sapiens
DPYHVWYQGNASLGGHLTHVLEGPDTNTTIIQLQPLQEPESWAR

SEQ ID NO: 3364 - protein, 13 aa, Homo sapiens
EFLEDTCVQYVQK

SEQ ID NO: 3365 - protein, 10 aa, Homo sapiens
LHMLQISYFR

SEQ ID NO: 3366 - protein, 9 aa, Homo sapiens
TLAFPLTIR

SEQ ID NO: 3367 - protein, 17 aa, Homo sapiens
TQSGLQSYLLQFHGLVR

SEQ ID NO: 3368 - protein, 32 aa, Homo sapiens
AGICFGDSGGPLICDGIIQGIDSFVIWGCATR

SEQ ID NO: 3369 - protein, 26 aa, Homo sapiens
GNPGSHFCGGTLIHPSFVLTAAHCLR

SEQ ID NO: 3370 - protein, 8 aa, Homo sapiens
LFPDFFTR

SEQ ID NO: 3371 - protein, 44 aa, Homo sapiens
LNDVLLIQLSSPANLSASVATVQLPQQDQPVPHGTQCLAMGWGR

SEQ ID NO: 3372 - protein, 12 aa, Homo sapiens
LVNVVLGAHNVR

SEQ ID NO: 3373 - protein, 24 aa, Homo sapiens
TQEPTQQHFSVAQVFLNNYDAENK

SEQ ID NO: 3374 - protein, 9 aa, Homo sapiens
VALYVDWIR

SEQ ID NO: 3375 - protein, 24 aa, Homo sapiens
VGAHDPPAQVLQELNVTVVTFFCR

SEQ ID NO: 3376 - protein, 34 aa, Homo sapiens
VGAHDPPAQVLQELNVTVVTFFCRPHNICTFVPR

SEQ ID NO: 3377 - protein, 20 aa, Homo sapiens
HANETSLSIMWQTPVAEWEK

SEQ ID NO: 3378 - protein, 31 aa, Homo sapiens
HATSYAFHGLTPGYLYNLTVMTEAAGLQNYR

SEQ ID NO: 3379 - protein, 22 aa, Homo sapiens
IDNTTYGCNLQDLQAGTIYNFR

SEQ ID NO: 3380 - protein, 24 aa, Homo sapiens
LSNVDDDPCSDYINASYIPGNNFR

SEQ ID NO: 3381 - protein, 10 aa, Homo sapiens
LVNESLCLQK

SEQ ID NO: 3382 - protein, 31 aa, Homo sapiens
NRSTEDLHVTWSGANGDVDQYEIQLLFNDMK

SEQ ID NO: 3383 - protein, 12 aa, Homo sapiens
SALCLAISNSSR

SEQ ID NO: 3384 - protein, 16 aa, Homo sapiens
SFSVYTNGSTVPSPVK

SEQ ID NO: 3385 - protein, 14 aa, Homo sapiens
TIQNQQWMWTEDEK

SEQ ID NO: 3386 - protein, 15 aa, Homo sapiens
VTSYEVQLFDENNQK

SEQ ID NO: 3387 - protein, 18 aa, Homo sapiens
WQRPPGNVDSYNITLSHK

SEQ ID NO: 3388 - protein, 22 aa, Homo sapiens
HGESGSMAVFHQTQGPSYSESK

SEQ ID NO: 3389 - protein, 7 aa, Homo sapiens
LEFVAAR

SEQ ID NO: 3390 - protein, 17 aa, Homo sapiens
PINTTLICNVTNALGAR

SEQ ID NO: 3391 - protein, 21 aa, Homo sapiens
PVDKPINTTLICNVTNALGAR

SEQ ID NO: 3392 - protein, 9 aa, Homo sapiens
QAELTVQVK

SEQ ID NO: 3393 - protein, 31 aa, Homo sapiens
SNPEPTGYNWSTTMGPLPPFAVAQGAQLLIR

SEQ ID NO: 3394 - protein, 19 aa, Homo sapiens
VEDEGNYTCLFVTFPQGSR

SEQ ID NO: 3395 - protein, 47 aa, Homo sapiens
VEHESFEKPQLLTVNLTVYYPPEVSISGYDNNWYLGQNEATLTCDAR

SEQ ID NO: 3396 - protein, 16 aa, Homo sapiens
ANEQLGLTSMHTLWFR

SEQ ID NO: 3397 - protein, 33 aa, Homo sapiens
DGQVTCFVEACPPATCAVPVNIPGACCPVCLQK

SEQ ID NO: 3398 - protein, 21 aa, Homo sapiens
FHISPEGFLTINDVGPADAGR

SEQ ID NO: 3399 - protein, 11 aa, Homo sapiens
ILCDNADNITR

SEQ ID NO: 3400 - protein, 24 aa, Homo sapiens
ISGVALHDQGQYECQAVNIIGSQK

SEQ ID NO: 3401 - protein, 20 aa, Homo sapiens
LDSNTLHCDCEILWLADLLK

SEQ ID NO: 3402 - protein, 19 aa, Homo sapiens
LSTTECVDAGGESHANNTK

SEQ ID NO: 3403 - protein, 18 aa, Homo sapiens
LWYENPGVFSPAQLTQIK

SEQ ID NO: 3404 - protein, 24 aa, Homo sapiens
LYGSTLNIDLFPALVVEDLVPGSR

SEQ ID NO: 3405 - protein, 15 aa, Homo sapiens
QGEHLSNSTSAFSTR

SEQ ID NO: 3406 - protein, 47 aa, Homo sapiens
TLQLIQEHVQHGLMVDLNGTSYHYNDLVSPQYLNLIANLSGCTAHRR

SEQ ID NO: 3407 - protein, 16 aa, Homo sapiens
VAEFPHGYGSCDEIPR

SEQ ID NO: 3408 - protein, 15 aa, Homo sapiens
VYCNLSAAHTFEDLK

SEQ ID NO: 3409 - protein, 20 aa, Homo sapiens
AHFSPSNIILDFPAAGSAAR

SEQ ID NO: 3410 - protein, 23 aa, Homo sapiens
AWRPALYLAALDCAEETNSAVCR

SEQ ID NO: 3411 - protein, 16 aa, Homo sapiens
DCASHFEQMAAASMHR

SEQ ID NO: 3412 - protein, 11 aa, Homo sapiens
DFNIPGFPTVR

SEQ ID NO: 3413 - protein, 21 aa, Homo sapiens
DVQNVAAAPELAMGALELESR

SEQ ID NO: 3414 - protein, 7 aa, Homo sapiens
EVLPAIR

SEQ ID NO: 3415 - protein, 14 aa, Homo sapiens
FGVTDFPSCYLLFR

SEQ ID NO: 3416 - protein, 8 aa, Homo sapiens
FPVLEGQR

SEQ ID NO: 3417 - protein, 10 aa, Homo sapiens
GYVHYFFGCR

SEQ ID NO: 3418 - protein, 15 aa, Homo sapiens
IYMADLESALHYILR

SEQ ID NO: 3419 - protein, 15 aa, Homo sapiens
KFGVTDFPSCYLLFR

SEQ ID NO: 3420 - protein, 13 aa, Homo sapiens
LAGAPSEDPQFPK

SEQ ID NO: 3421 - protein, 16 aa, Homo sapiens
LDVPVWDVEATLNFLK

SEQ ID NO: 3422 - protein, 10 aa, Homo sapiens
LEEIDGFFAR

SEQ ID NO: 3423 - protein, 23 aa, Homo sapiens
LIDALESHHDTWPPACPPLEPAK

SEQ ID NO: 3424 - protein, 33 aa, Homo sapiens
LIDALESHHDTWPPACPPLEPAKLEEIDGFFAR

SEQ ID NO: 3425 - protein, 18 aa, Homo sapiens
NGSGAVFPVAGADVQTLR

SEQ ID NO: 3426 - protein, 12 aa, Homo sapiens
NNEEYLALIFEK

SEQ ID NO: 3427 - protein, 20 aa, Homo sapiens
PALYLAALDCAEETNSAVCR

SEQ ID NO: 3428 - protein, 23 aa, Homo sapiens
PEMMKSPTNTTPHVPAEGPEASR

SEQ ID NO: 3429 - protein, 15 aa, Homo sapiens
PLVQNFLHSVNEWLK

SEQ ID NO: 3430 - protein, 22 aa, Homo sapiens
RDVQNVAAAPELAMGALELESR

SEQ ID NO: 3431 - protein, 19 aa, Homo sapiens
SALYSPSDPLTLLQADTVR

SEQ ID NO: 3432 - protein, 9 aa, Homo sapiens
SFYTAYLQR

SEQ ID NO: 3433 - protein, 17 aa, Homo sapiens
VGSPNAAVLWLWSSHNR

SEQ ID NO: 3434 - protein, 10 aa, Homo sapiens
VLNTEANVVR

SEQ ID NO: 3435 - protein, 14 aa, Homo sapiens
VNWIGCQGSEPHFR

SEQ ID NO: 3436 - protein, 20 aa, Homo sapiens
YFPGRPLVQNFLHSVNEWLK

SEQ ID NO: 3437 - protein, 13 aa, Homo sapiens
DVPCEDKFSFVCK

SEQ ID NO: 3438 - protein, 17 aa, Homo sapiens
ESGTDDFNVWIGLHDPK

SEQ ID NO: 3439 - protein, 35 aa, Homo sapiens
ETWVDADLYCQNMNSGNLVSVLTQAEGAFVASLIK

SEQ ID NO: 3440 - protein, 26 aa, Homo sapiens
SWGIGAPSSVNPGYCVSLTSSTGFQK

SEQ ID NO: 3441 - protein, 10 aa, Homo sapiens
SYCYYFNEDR

SEQ ID NO: 3442 - protein, 11 aa, Homo sapiens
ISCPEGTNAYR

SEQ ID NO: 3443 - protein, 12 aa, Homo sapiens
WHWSSGSLVSYK

SEQ ID NO: 3444 - protein, 23 aa, Homo sapiens
CKPVNTFVHEPLVDVQNVCFQEK

SEQ ID NO: 3445 - protein, 24 aa, Homo sapiens
HIIVACEGSPYVPVHFDASVEDST

SEQ ID NO: 3446 - protein, 21 aa, Homo sapiens
PVNTFVHEPLVDVQNVCFQEK

SEQ ID NO: 3447 - protein, 11 aa, Homo sapiens
SNSSMHITDCR

SEQ ID NO: 3448 - protein, 14 aa, Homo sapiens
DPPQYPVVPVHLDR

SEQ ID NO: 3449 - protein, 28 aa, Homo sapiens
NCHHSGSQVPLIHCNLTTPSPQNISNCR

SEQ ID NO: 3450 - protein, 28 aa, Homo sapiens
NQNTFLLTTFANVVNVCGNPNMTCPSNK

SEQ ID NO: 3451 - protein, 15 aa, Homo sapiens
RDPPQYPVVPVHLDR

SEQ ID NO: 3452 - protein, 17 aa, Homo sapiens
YAQTPANMFYIVACDNR

SEQ ID NO: 3453 - protein, 12 aa, Homo sapiens
ARGPDSNVLLLR

SEQ ID NO: 3454 - protein, 29 aa, Homo sapiens
DMVAVVGEQFTLECGPPWGHPEPTVSWWK

SEQ ID NO: 3455 - protein, 23 aa, Homo sapiens
GHAHDGQALSTDLGVYTCEASNR

SEQ ID NO: 3456 - protein, 10 aa, Homo sapiens
GPDSNVLLLR

SEQ ID NO: 3457 - protein, 18 aa, Homo sapiens
IQLENVTLLNPDPAEGPK

SEQ ID NO: 3458 - protein, 20 aa, Homo sapiens
IQLENVTLLNPDPAEGPKPR

SEQ ID NO: 3459 - protein, 7 aa, Homo sapiens
LSVAVLR

SEQ ID NO: 3460 - protein, 8 aa, Homo sapiens
PAVWLSWK

SEQ ID NO: 3461 - protein, 14 aa, Homo sapiens
PDWLEDMEVSHTQR

SEQ ID NO: 3462 - protein, 37 aa, Homo sapiens
TQTAPGGQGAPWAEELLAGWQSAELGGLHWGQDYEFK

SEQ ID NO: 3463 - protein, 35 aa, Homo sapiens
VPSAPPQEVTLKPGNGTVFVSWVPPPAENHNGIIR

SEQ ID NO: 3464 - protein, 16 aa, Homo sapiens
VSGPAAPAQSYTALFR

SEQ ID NO: 3465 - protein, 19 aa, Homo sapiens
VSIQEPQDYTEPVELLAVR

SEQ ID NO: 3466 - protein, 20 aa, Homo sapiens
FFGHGAEDSLADQAANEWGR

SEQ ID NO: 3467 - protein, 15 aa, Homo sapiens
GPGGVWAAEAISDAR

SEQ ID NO: 3468 - protein, 16 aa, Homo sapiens
RGPGGVWAAEAISDAR

SEQ ID NO: 3469 - protein, 21 aa, Homo sapiens
RGPGGVWAAEAISDARENIQR

SEQ ID NO: 3470 - protein, 13 aa, Homo sapiens
GAEDSLADQAANK

SEQ ID NO: 3471 - protein, 15 aa, Homo sapiens
GPGGAWAAEVISNAR

SEQ ID NO: 3472 - protein, 20 aa, Homo sapiens
GPGGAWAAEVISNARENIQR

SEQ ID NO: 3473 - protein, 16 aa, Homo sapiens
RGPGGAWAAEVISNAR

SEQ ID NO: 3474 - protein, 21 aa, Homo sapiens
RGPGGAWAAEVISNARENIQR

SEQ ID NO: 3475 - protein, 20 aa, Homo sapiens
AYSDMREANYIGSDKYFHAR

SEQ ID NO: 3476 - protein, 13 aa, Homo sapiens
DPNHFRPAGLPEK

SEQ ID NO: 3477 - protein, 9 aa, Homo sapiens
EANYIGSDK

SEQ ID NO: 3478 - protein, 14 aa, Homo sapiens
EANYIGSDKYFHAR

SEQ ID NO: 3479 - protein, 8 aa, Homo sapiens
PAGLPEKY

SEQ ID NO: 3480 - protein, 16 aa, Homo sapiens
RGPGGAWAAEVISNAR

SEQ ID NO: 3481 - protein, 21 aa, Homo sapiens
RGPGGAWAAEVISNARENIQR

SEQ ID NO: 3482 - protein, 14 aa, Homo sapiens
SFFSFLGEAFDGAR

SEQ ID NO: 3483 - protein, 39 aa, Homo sapiens
CEQIVNCTALESPEHGSLVCSHPLGNFSYNSSCSISCDR

SEQ ID NO: 3484 - protein, 22 aa, Homo sapiens
EEIEYLNSILSYSPSYYWIGIR

SEQ ID NO: 3485 - protein, 15 aa, Homo sapiens
FACPEGWTLNGSAAR

SEQ ID NO: 3486 - protein, 14 aa, Homo sapiens
GYMNCLPSASGSFR

SEQ ID NO: 3487 - protein, 16 aa, Homo sapiens
INMSCSGEPVFGTVCK

SEQ ID NO: 3488 - protein, 19 aa, Homo sapiens
KFVPASSCQSLESDGSYQK

SEQ ID NO: 3489 - protein, 30 aa, Homo sapiens
LALCYTAACTNTSCSGHGECVETINNYTCK

SEQ ID NO: 3490 - protein, 20 aa, Homo sapiens
LQCGPTGEWDNEKPTCEAVR

SEQ ID NO: 3491 - protein, 47 aa, Homo sapiens
SSCNFTCEEGFMLQGPAQVECTTQGQWTQQIPVCEAFQCTALSNPER

SEQ ID NO: 3492 - protein, 19 aa, Homo sapiens
VNNVWVWVGTQKPLTEEAK

SEQ ID NO: 3493 - protein, 16 aa, Homo sapiens
YGSSCEFSCEQGFVLK

SEQ ID NO: 3494 - protein, 16 aa, Homo sapiens
CGNCSLTTLKDEDFCK

SEQ ID NO: 3495 - protein, 8 aa, Homo sapiens
CINQLLCK

SEQ ID NO: 3496 - protein, 10 aa, Homo sapiens
CGNCSLTTLK

SEQ ID NO: 3497 - protein, 17 aa, Homo sapiens
CGNCSLTTLKDEDFCKR

SEQ ID NO: 3498 - protein, 8 aa, Homo sapiens
DDFLIYDR

SEQ ID NO: 3499 - protein, 13 aa, Homo sapiens
DMPASEDLQDLQK

SEQ ID NO: 3500 - protein, 19 aa, Homo sapiens
EGYSNISYIVVNHQGISSR

SEQ ID NO: 3501 - protein, 17 aa, Homo sapiens
KCGNCSLTTLKDEDFCK

SEQ ID NO: 3502 - protein, 20 aa, Homo sapiens
KEGYSNISYIVVNHQGISSR

SEQ ID NO: 3503 - protein, 10 aa, Homo sapiens
LPTDSELAPR

SEQ ID NO: 3504 - protein, 22 aa, Homo sapiens
LVYHLGLPFSFLTFPYVEEAIK

SEQ ID NO: 3505 - protein, 8 aa, Homo sapiens
QPPAWSIR

SEQ ID NO: 3506 - protein, 25 aa, Homo sapiens
VSEHIPVYQQEENQTDVWTLLNGSK

SEQ ID NO: 3507 - protein, 33 aa, Homo sapiens
VSEHIPVYQQEENQTDVWTLLNGSKDDFLIYDR

SEQ ID NO: 3508 - protein, 32 aa, Homo sapiens
ADTHDEILEGLNFNLTEIPEAQIHEGFQELLR

SEQ ID NO: 3509 - protein, 56 aa, Homo sapiens
ADTHDEILEGLNFNLTEIPEAQIHEGFQELLRTLNQPDSQLQLTTGNGLFLSEGLK

SEQ ID NO: 3510 - protein, 34 aa, Homo sapiens
AVHKAVLTIDEKGTEAAGAMFLEAIPMSIPPEVK

SEQ ID NO: 3511 - protein, 8 aa, Homo sapiens
AVLTIDEK

SEQ ID NO: 3512 - protein, 30 aa, Homo sapiens
AVLTIDEKGTEAAGAMFLEAIPMSIPPEVK

SEQ ID NO: 3513 - protein, 16 aa, Homo sapiens
DTEEEDFHVDQVTTVK

SEQ ID NO: 3514 - protein, 21 aa, Homo sapiens
DTEEEDFHVDQVTTVKVPMMK

SEQ ID NO: 3515 - protein, 13 aa, Homo sapiens
DTVFALVNYIFFK

SEQ ID NO: 3516 - protein, 15 aa, Homo sapiens
DTVFALVNYIFFKGK

SEQ ID NO: 3517 - protein, 17 aa, Homo sapiens
ELDRDTVFALVNYIFFK

SEQ ID NO: 3518 - protein, 19 aa, Homo sapiens
ELDRDTVFALVNYIFFKGK

SEQ ID NO: 3519 - protein, 6 aa, Homo sapiens
FLEDVK

SEQ ID NO: 3520 - protein, 7 aa, Homo sapiens
FLEDVKK

SEQ ID NO: 3521 - protein, 7 aa, Homo sapiens
FLENEDR

SEQ ID NO: 3522 - protein, 8 aa, Homo sapiens
FLENEDRR

SEQ ID NO: 3523 - protein, 15 aa, Homo sapiens
FNKPFVFLMIEQNTK

SEQ ID NO: 3524 - protein, 22 aa, Homo sapiens
FNKPFVFLMIEQNTKSPLFMGK

SEQ ID NO: 3525 - protein, 10 aa, Homo sapiens
GKWERPFEVK

SEQ ID NO: 3526 - protein, 22 aa, Homo sapiens
GTEAAGAMFLEAIPMSIPPEVK

SEQ ID NO: 3527 - protein, 14 aa, Homo sapiens
ITPNLAEFAFSLYR

SEQ ID NO: 3528 - protein, 44 aa, Homo sapiens
ITPNLAEFAFSLYRQLAHQSNSTNIFFSPVSIATAFAMLSLGTK

SEQ ID NO: 3529 - protein, 10 aa, Homo sapiens
IVDLVKELDR

SEQ ID NO: 3530 - protein, 23 aa, Homo sapiens
IVDLVKELDRDTVFALVNYIFFK

SEQ ID NO: 3531 - protein, 10 aa, Homo sapiens
KLSSWVLLMK

SEQ ID NO: 3532 - protein, 19 aa, Homo sapiens
KLYHSEAFTVNFGDTEEAK

SEQ ID NO: 3533 - protein, 20 aa, Homo sapiens
KLYHSEAFTVNFGDTEEAKK

SEQ ID NO: 3534 - protein, 9 aa, Homo sapiens
KQINDYVEK

SEQ ID NO: 3535 - protein, 10 aa, Homo sapiens
LGMFNIQHCK

SEQ ID NO: 3536 - protein, 15 aa, Homo sapiens
LQHLENELTHDIITK

SEQ ID NO: 3537 - protein, 22 aa, Homo sapiens
LQHLENELTHDIITKFLENEDR

SEQ ID NO: 3538 - protein, 23 aa, Homo sapiens
LQHLENELTHDIITKFLENEDRR

SEQ ID NO: 3539 - protein, 10 aa, Homo sapiens
LSITGTYDLK

SEQ ID NO: 3540 - protein, 20 aa, Homo sapiens
LSITGTYDLKSVLGQLGITK

SEQ ID NO: 3541 - protein, 9 aa, Homo sapiens
LSSWVLLMK

SEQ ID NO: 3542 - protein, 25 aa, Homo sapiens
LSSWVLLMKYLGNATAIFFLPDEGK

SEQ ID NO: 3543 - protein, 10 aa, Homo sapiens
LVDKFLEDVK

SEQ ID NO: 3544 - protein, 11 aa, Homo sapiens
LVDKFLEDVKK

SEQ ID NO: 3545 - protein, 18 aa, Homo sapiens
LYHSEAFTVNFGDTEEAK

SEQ ID NO: 3546 - protein, 19 aa, Homo sapiens
LYHSEAFTVNFGDTEEAKK

SEQ ID NO: 3547 - protein, 27 aa, Homo sapiens
LYHSEAFTVNFGDTEEAKKQINDYVEK

SEQ ID NO: 3548 - protein, 21 aa, Homo sapiens
PFEVKDTEEEDFHVDQVTTVK

SEQ ID NO: 3549 - protein, 12 aa, Homo sapiens
PFVFLMIEQNTK

SEQ ID NO: 3550 - protein, 8 aa, Homo sapiens
QINDYVEK

SEQ ID NO: 3551 - protein, 30 aa, Homo sapiens
QLAHQSNSTNIFFSPVSIATAFAMLSLGTK

SEQ ID NO: 3552 - protein, 62 aa, Homo sapiens
QLAHQSNSTNIFFSPVSIATAFAMLSLGTKADTHDEILEGLNFNLTEIPEAQIHEGFQELLR

SEQ ID NO: 3553 - protein, 11 aa, Homo sapiens
RLGMFNIQHCK

SEQ ID NO: 3554 - protein, 8 aa, Homo sapiens
SASLHLPK

SEQ ID NO: 3555 - protein, 18 aa, Homo sapiens
SASLHLPKLSITGTYDLK

SEQ ID NO: 3556 - protein, 7 aa, Homo sapiens
SPLFMGK

SEQ ID NO: 3557 - protein, 10 aa, Homo sapiens
SVLGQLGITK

SEQ ID NO: 3558 - protein, 28 aa, Homo sapiens
SVLGQLGITKVFSNGADLSGVTEEAPLK

SEQ ID NO: 3559 - protein, 31 aa, Homo sapiens
SVLGQLGITKVFSNGADLSGVTEEAPLKLSK

SEQ ID NO: 3560 - protein, 15 aa, Homo sapiens
TDTSHHDQDHPTFNK

SEQ ID NO: 3561 - protein, 29 aa, Homo sapiens
TDTSHHDQDHPTFNKITPNLAEFAFSLYR

SEQ ID NO: 3562 - protein, 24 aa, Homo sapiens
TLNQPDSQLQLTTGNGLFLSEGLK

SEQ ID NO: 3563 - protein, 28 aa, Homo sapiens
TLNQPDSQLQLTTGNGLFLSEGLKLVDK

SEQ ID NO: 3564 - protein, 34 aa, Homo sapiens
TLNQPDSQLQLTTGNGLFLSEGLKLVDKFLEDVK

SEQ ID NO: 3565 - protein, 18 aa, Homo sapiens
VFSNGADLSGVTEEAPLK

SEQ ID NO: 3566 - protein, 21 aa, Homo sapiens
VFSNGADLSGVTEEAPLKLSK

SEQ ID NO: 3567 - protein, 25 aa, Homo sapiens
VFSNGADLSGVTEEAPLKLSKAVHK

SEQ ID NO: 3568 - protein, 24 aa, Homo sapiens
WERPFEVKDTEEEDFHVDQVTTVK

SEQ ID NO: 3569 - protein, 16 aa, Homo sapiens
YLGNATAIFFLPDEGK

SEQ ID NO: 3570 - protein, 31 aa, Homo sapiens
YLGNATAIFFLPDEGKLQHLENELTHDIITK

SEQ ID NO: 3571 - protein, 7 aa, Homo sapiens
VVNPTQK

SEQ ID NO: 3572 - protein, 8 aa, Homo sapiens
ETFFNLSK

SEQ ID NO: 3573 - protein, 11 aa, Homo sapiens
ETSNFGFSLLR

SEQ ID NO: 3574 - protein, 7 aa, Homo sapiens
FASTFDK

SEQ ID NO: 3575 - protein, 20 aa, Homo sapiens
GLHLQALKPTKPGLLPSLFK

SEQ ID NO: 3576 - protein, 22 aa, Homo sapiens
GTEAVAGILSEITAYSMPPVIK

SEQ ID NO: 3577 - protein, 32 aa, Homo sapiens
HDGNMVFSPFGMSLAMTGLMLGATGPTETQIK

SEQ ID NO: 3578 - protein, 16 aa, Homo sapiens
IFSPFADLSELSATGR

SEQ ID NO: 3579 - protein, 10 aa, Homo sapiens
LFDEINPETK

SEQ ID NO: 3580 - protein, 10 aa, Homo sapiens
LILVDYILFK

SEQ ID NO: 3581 - protein, 16 aa, Homo sapiens
LPYQGNATMLVVLMEK

SEQ ID NO: 3582 - protein, 21 aa, Homo sapiens
MGDHLALEDYLTTDLVETWLR

SEQ ID NO: 3583 - protein, 16 aa, Homo sapiens
NLELGLTQGSFAFIHK

SEQ ID NO: 3584 - protein, 21 aa, Homo sapiens
NLELGLTQGSFAFIHKDFDVK

SEQ ID NO: 3585 - protein, 8 aa, Homo sapiens
NMEVFFPK

SEQ ID NO: 3586 - protein, 9 aa, Homo sapiens
PGLLPSLFK

SEQ ID NO: 3587 - protein, 12 aa, Homo sapiens
PTKPGLLPSLFK

SEQ ID NO: 3588 - protein, 8 aa, Homo sapiens
TVIEVDER

SEQ ID NO: 3589 - protein, 22 aa, Homo sapiens
VDRPFHFMIYEETSGMLLFLGR

SEQ ID NO: 3590 - protein, 7 aa, Homo sapiens
VVNPTLL

SEQ ID NO: 3591 - protein, 19 aa, Homo sapiens
WLTPFDPVFTEVDTFHLDK

SEQ ID NO: 3592 - protein, 21 aa, Homo sapiens
WLTPFDPVFTEVDTFHLDKYK

SEQ ID NO: 3593 - protein, 8 aa, Homo sapiens
YEMHELLR

SEQ ID NO: 3594 - protein, 12 aa, Homo sapiens
YFDTECVPMNFR

SEQ ID NO: 3595 - protein, 10 aa, Homo sapiens
ADLSGITGAR

SEQ ID NO: 3596 - protein, 20 aa, Homo sapiens
ADLSGITGARNLAVSQVVHK

SEQ ID NO: 3597 - protein, 16 aa, Homo sapiens
AKWEMPFDPQDTHQSR

SEQ ID NO: 3598 - protein, 34 aa, Homo sapiens
APDKNVIFSPLSISTALAFLSLGAHNTTLTEILK

SEQ ID NO: 3599 - protein, 19 aa, Homo sapiens
AVLDVFEEGTEASAATAVK

SEQ ID NO: 3600 - protein, 12 aa, Homo sapiens
DEELSCTVVELK

SEQ ID NO: 3601 - protein, 28 aa, Homo sapiens
DEELSCTVVELKYTGNASALFILPDQDK

SEQ ID NO: 3602 - protein, 42 aa, Homo sapiens
DEELSCTVVELKYTGNASALFILPDQDKMEEVEAMLLPETLK

SEQ ID NO: 3603 - protein, 17 aa, Homo sapiens
DLDSQTMMVLVNYIFFK

SEQ ID NO: 3604 - protein, 19 aa, Homo sapiens
DLDSQTMMVLVNYIFFKAK

SEQ ID NO: 3605 - protein, 6 aa, Homo sapiens
DSLEFR

SEQ ID NO: 3606 - protein, 15 aa, Homo sapiens
DSLEFREIGELYLPK

SEQ ID NO: 3607 - protein, 20 aa, Homo sapiens
DYNLNDILLQLGIEEAFTSK

SEQ ID NO: 3608 - protein, 30 aa, Homo sapiens
DYNLNDILLQLGIEEAFTSKADLSGITGAR

SEQ ID NO: 3609 - protein, 9 aa, Homo sapiens
EIGELYLPK

SEQ ID NO: 3610 - protein, 14 aa, Homo sapiens
EIGELYLPKFSISR

SEQ ID NO: 3611 - protein, 8 aa, Homo sapiens
EQLSLLDR

SEQ ID NO: 3612 - protein, 14 aa, Homo sapiens
EQLSLLDRFTEDAK

SEQ ID NO: 3613 - protein, 15 aa, Homo sapiens
EQLSLLDRFTEDAKR

SEQ ID NO: 3614 - protein, 20 aa, Homo sapiens
FNLTETSEAEIHQSFQHLLR

SEQ ID NO: 3615 - protein, 22 aa, Homo sapiens
FNRPFLMIIVPTDTQNIFFMSK

SEQ ID NO: 3616 - protein, 25 aa, Homo sapiens
FSISRDYNLNDILLQLGIEEAFTSK

SEQ ID NO: 3617 - protein, 25 aa, Homo sapiens
GKITDLIKDLDSQTMMVLVNYIFFK

SEQ ID NO: 3618 - protein, 23 aa, Homo sapiens
GLKFNLTETSEAEIHQSFQHLLR

SEQ ID NO: 3619 - protein, 43 aa, Homo sapiens
GLKFNLTETSEAEIHQSFQHLLRTLNQSSDELQLSMGNAMFVK

SEQ ID NO: 3620 - protein, 21 aa, Homo sapiens
GTHVDLGLASANVDFAFSLYK

SEQ ID NO: 3621 - protein, 23 aa, Homo sapiens
ITDLIKDLDSQTMMVLVNYIFFK

SEQ ID NO: 3622 - protein, 11 aa, Homo sapiens
ITLLSALVETR

SEQ ID NO: 3623 - protein, 19 aa, Homo sapiens
KWVMVPMMSLHHLTIPYFR

SEQ ID NO: 3624 - protein, 31 aa, Homo sapiens
KWVMVPMMSLHHLTIPYFRDEELSCTVVELK

SEQ ID NO: 3625 - protein, 7 aa, Homo sapiens
LINDYVK

SEQ ID NO: 3626 - protein, 18 aa, Homo sapiens
LYGSEAFATDFQDSAAAK

SEQ ID NO: 3627 - protein, 19 aa, Homo sapiens
LYGSEAFATDFQDSAAAKK

SEQ ID NO: 3628 - protein, 14 aa, Homo sapiens
MEEVEAMLLPETLK

SEQ ID NO: 3629 - protein, 15 aa, Homo sapiens
MEEVEAMLLPETLKR

SEQ ID NO: 3630 - protein, 10 aa, Homo sapiens
NLAVSQVVHK

SEQ ID NO: 3631 - protein, 29 aa, Homo sapiens
NLAVSQVVHKAVLDVFEEGTEASAATAVK

SEQ ID NO: 3632 - protein, 30 aa, Homo sapiens
NVIFSPLSISTALAFLSLGAHNTTLTEILK

SEQ ID NO: 3633 - protein, 19 aa, Homo sapiens
PFLMIIVPTDTQNIFFMSK

SEQ ID NO: 3634 - protein, 19 aa, Homo sapiens
RLYGSEAFATDFQDSAAAK

SEQ ID NO: 3635 - protein, 20 aa, Homo sapiens
RLYGSEAFATDFQDSAAAKK

SEQ ID NO: 3636 - protein, 20 aa, Homo sapiens
TLNQSSDELQLSMGNAMFVK

SEQ ID NO: 3637 - protein, 28 aa, Homo sapiens
TLNQSSDELQLSMGNAMFVKEQLSLLDR

SEQ ID NO: 3638 - protein, 34 aa, Homo sapiens
TLNQSSDELQLSMGNAMFVKEQLSLLDRFTEDAK

SEQ ID NO: 3639 - protein, 14 aa, Homo sapiens
WEMPFDPQDTHQSR

SEQ ID NO: 3640 - protein, 8 aa, Homo sapiens
WRDSLEFR

SEQ ID NO: 3641 - protein, 17 aa, Homo sapiens
WRDSLEFREIGELYLPK

SEQ ID NO: 3642 - protein, 18 aa, Homo sapiens
WVMVPMMSLHHLTIPYFR

SEQ ID NO: 3643 - protein, 30 aa, Homo sapiens
WVMVPMMSLHHLTIPYFRDEELSCTVVELK

SEQ ID NO: 3644 - protein, 16 aa, Homo sapiens
YTGNASALFILPDQDK

SEQ ID NO: 3645 - protein, 30 aa, Homo sapiens
YTGNASALFILPDQDKMEEVEAMLLPETLK

SEQ ID NO: 3646 - protein, 31 aa, Homo sapiens
YTGNASALFILPDQDKMEEVEAMLLPETLKR

SEQ ID NO: 3647 - protein, 11 aa, Homo sapiens
ALWEKPFISSR

SEQ ID NO: 3648 - protein, 21 aa, Homo sapiens
ATLDVDEAGTEAAAATSFAIK

SEQ ID NO: 3649 - protein, 11 aa, Homo sapiens
DFYVDENTTVR

SEQ ID NO: 3650 - protein, 13 aa, Homo sapiens
DVLMVLVNYIYFK

SEQ ID NO: 3651 - protein, 13 aa, Homo sapiens
EIEEVLTPEMLMR

SEQ ID NO: 3652 - protein, 8 aa, Homo sapiens
FFSAQTNR

SEQ ID NO: 3653 - protein, 12 aa, Homo sapiens
FLNDTMAVYEAK

SEQ ID NO: 3654 - protein, 15 aa, Homo sapiens
FSISGSYVLDQILPR

SEQ ID NO: 3655 - protein, 12 aa, Homo sapiens
FYYLIASETPGK

SEQ ID NO: 3656 - protein, 14 aa, Homo sapiens
GDATVFFILPNQGK

SEQ ID NO: 3657 - protein, 19 aa, Homo sapiens
GFQHLLHTLNLPGHGLETR

SEQ ID NO: 3658 - protein, 11 aa, Homo sapiens
IAPANADFAFR

SEQ ID NO: 3659 - protein, 9 aa, Homo sapiens
IVDLVSELK

SEQ ID NO: 3660 - protein, 10 aa, Homo sapiens
IVDLVSELKK

SEQ ID NO: 3661 - protein, 14 aa, Homo sapiens
KDVLMVLVNYIYFK

SEQ ID NO: 3662 - protein, 21 aa, Homo sapiens
LFHTNFYDTVGTIQLINDHVK

SEQ ID NO: 3663 - protein, 22 aa, Homo sapiens
LFHTNFYDTVGTIQLINDHVKK

SEQ ID NO: 3664 - protein, 9 aa, Homo sapiens
LGFTDLFSK

SEQ ID NO: 3665 - protein, 18 aa, Homo sapiens
MDYKGDATVFFILPNQGK

SEQ ID NO: 3666 - protein, 15 aa, Homo sapiens
MREIEEVLTPEMLMR

SEQ ID NO: 3667 - protein, 25 aa, Homo sapiens
NIFFSPLSISAAYAMLSLGACSHSR

SEQ ID NO: 3668 - protein, 21 aa, Homo sapiens
SQILEGLGFNLTELSESDVHR

SEQ ID NO: 3669 - protein, 15 aa, Homo sapiens
TTPKDFYVDENTTVR

SEQ ID NO: 3670 - protein, 12 aa, Homo sapiens
VGSALFLSHNLK

SEQ ID NO: 3671 - protein, 17 aa, Homo sapiens
VPMMLQDQEHHWYLHDR

SEQ ID NO: 3672 - protein, 9 aa, Homo sapiens
WADLSGITK

SEQ ID NO: 3673 - protein, 6 aa, Homo sapiens
WNNLLR

SEQ ID NO: 3674 - protein, 8 aa, Homo sapiens
YLPCSVLR

SEQ ID NO: 3675 - protein, 12 aa, Homo sapiens
AAAATGTIFTFR

SEQ ID NO: 3676 - protein, 34 aa, Homo sapiens
ALASAAPSQSIFFSPVSISMSLAMLSLGAGSSTK

SEQ ID NO: 3677 - protein, 11 aa, Homo sapiens
AVVEVDESGTR

SEQ ID NO: 3678 - protein, 8 aa, Homo sapiens
DFTFDLYR

SEQ ID NO: 3679 - protein, 28 aa, Homo sapiens
DGFQLSLGNALFTDLVVDLQDTFVSAMK

SEQ ID NO: 3680 - protein, 10 aa, Homo sapiens
EDQYHYLLDR

SEQ ID NO: 3681 - protein, 15 aa, Homo sapiens
EDQYHYLLDRNLSCR

SEQ ID NO: 3682 - protein, 11 aa, Homo sapiens
FSIEGSYQLEK

SEQ ID NO: 3683 - protein, 13 aa, Homo sapiens
GFQQLLQELNQPR

SEQ ID NO: 3684 - protein, 16 aa, Homo sapiens
GTQEQDFYVTSETVVR

SEQ ID NO: 3685 - protein, 21 aa, Homo sapiens
LVFNRPFLMFIVDNNILFLGK

SEQ ID NO: 3686 - protein, 13 aa, Homo sapiens
MQILEGLGLNLQK

SEQ ID NO: 3687 - protein, 17 aa, Homo sapiens
NLDSNAVVIMVNYIFFK

SEQ ID NO: 3688 - protein, 8 aa, Homo sapiens
QLELYLPK

SEQ ID NO: 3689 - protein, 9 aa, Homo sapiens
RDFTFDLYR

SEQ ID NO: 3690 - protein, 13 aa, Homo sapiens
TLYLADTFPTNFR

SEQ ID NO: 3691 - protein, 34 aa, Homo sapiens
VLPSLGISNVFTSHADLSGISNHSNIQVSEMVHK

SEQ ID NO: 3692 - protein, 21 aa, Homo sapiens
VVGVPYQGNATALFILPSEGK

SEQ ID NO: 3693 - protein, 16 aa, Homo sapiens
ADGESCSASMMYQEGK

SEQ ID NO: 3694 - protein, 23 aa, Homo sapiens
AFLEVNEEGSEAAASTAVVIAGR

SEQ ID NO: 3695 - protein, 10 aa, Homo sapiens
ANRPFLVFIR

SEQ ID NO: 3696 - protein, 10 aa, Homo sapiens
ATEDEGSEQK

SEQ ID NO: 3697 - protein, 17 aa, Homo sapiens
ATEDEGSEQKIPEATNR

SEQ ID NO: 3698 - protein, 11 aa, Homo sapiens
DDLYVSDAFHK

SEQ ID NO: 3699 - protein, 11 aa, Homo sapiens
DIPMNPMCIYR

SEQ ID NO: 3700 - protein, 21 aa, Homo sapiens
ELFYKADGESCSASMMYQEGK

SEQ ID NO: 3701 - protein, 25 aa, Homo sapiens
ELTPEVLQEWLDELEEMMLVVHMPR

SEQ ID NO: 3702 - protein, 12 aa, Homo sapiens
ENAEQSRAAINK

SEQ ID NO: 3703 - protein, 16 aa, Homo sapiens
EQLQDMGLVDLFSPEK

SEQ ID NO: 3704 - protein, 12 aa, Homo sapiens
EVPLNTIIFMGR

SEQ ID NO: 3705 - protein, 13 aa, Homo sapiens
FATTFYQHLADSK

SEQ ID NO: 3706 - protein, 34 aa, Homo sapiens
FATTFYQHLADSKNDNDNIFLSPLSISTAFAMTK

SEQ ID NO: 3707 - protein, 7 aa, Homo sapiens
FDTISEK

SEQ ID NO: 3708 - protein, 18 aa, Homo sapiens
FDTISEKTSDQIHFFFAK

SEQ ID NO: 3709 - protein, 10 aa, Homo sapiens
FRIEDGFSLK

SEQ ID NO: 3710 - protein, 26 aa, Homo sapiens
FRIEDGFSLKEQLQDMGLVDLFSPEK

SEQ ID NO: 3711 - protein, 12 aa, Homo sapiens
GDDITMVLILPK

SEQ ID NO: 3712 - protein, 15 aa, Homo sapiens
GDDITMVLILPKPEK

SEQ ID NO: 3713 - protein, 8 aa, Homo sapiens
IEDGFSLK

SEQ ID NO: 3714 - protein, 24 aa, Homo sapiens
IEDGFSLKEQLQDMGLVDLFSPEK

SEQ ID NO: 3715 - protein, 7 aa, Homo sapiens
IPEATNR

SEQ ID NO: 3716 - protein, 25 aa, Homo sapiens
ITDVIPSEAINELTVLVLVNTIYFK

SEQ ID NO: 3717 - protein, 11 aa, Homo sapiens
KATEDEGSEQK

SEQ ID NO: 3718 - protein, 22 aa, Homo sapiens
KELFYKADGESCSASMMYQEGK

SEQ ID NO: 3719 - protein, 24 aa, Homo sapiens
LFGDKSLTFNETYQDISELVYGAK

SEQ ID NO: 3720 - protein, 16 aa, Homo sapiens
LGACNDTLQQLMEVFK

SEQ ID NO: 3721 - protein, 23 aa, Homo sapiens
LGACNDTLQQLMEVFKFDTISEK

SEQ ID NO: 3722 - protein, 34 aa, Homo sapiens
LGACNDTLQQLMEVFKFDTISEKTSDQIHFFFAK

SEQ ID NO: 3723 - protein, 9 aa, Homo sapiens
LPGIVAEGR

SEQ ID NO: 3724 - protein, 20 aa, Homo sapiens
LPGIVAEGRDDLYVSDAFHK

SEQ ID NO: 3725 - protein, 7 aa, Homo sapiens
LQPLDFK

SEQ ID NO: 3726 - protein, 14 aa, Homo sapiens
LQPLDFKENAEQSR

SEQ ID NO: 3727 - protein, 30 aa, Homo sapiens
LVSANRLFGDKSLTFNETYQDISELVYGAK

SEQ ID NO: 3728 - protein, 21 aa, Homo sapiens
NDNDNIFLSPLSISTAFAMTK

SEQ ID NO: 3729 - protein, 37 aa, Homo sapiens
NDNDNIFLSPLSISTAFAMTKLGACNDTLQQLMEVFK

SEQ ID NO: 3730 - protein, 7 aa, Homo sapiens
PFLVFIR

SEQ ID NO: 3731 - protein, 14 aa, Homo sapiens
RVAEGTQVLELPFK

SEQ ID NO: 3732 - protein, 11 aa, Homo sapiens
SKLPGIVAEGR

SEQ ID NO: 3733 - protein, 22 aa, Homo sapiens
SKLPGIVAEGRDDLYVSDAFHK

SEQ ID NO: 3734 - protein, 32 aa, Homo sapiens
SLAKVEKELTPEVLQEWLDELEEMMLVVHMPR

SEQ ID NO: 3735 - protein, 19 aa, Homo sapiens
SLTFNETYQDISELVYGAK

SEQ ID NO: 3736 - protein, 11 aa, Homo sapiens
TSDQIHFFFAK

SEQ ID NO: 3737 - protein, 13 aa, Homo sapiens
VAEGTQVLELPFK

SEQ ID NO: 3738 - protein, 25 aa, Homo sapiens
VAEGTQVLELPFKGDDITMVLILPK

SEQ ID NO: 3739 - protein, 28 aa, Homo sapiens
VAEGTQVLELPFKGDDITMVLILPKPEK

SEQ ID NO: 3740 - protein, 28 aa, Homo sapiens
VEKELTPEVLQEWLDELEEMMLVVHMPR

SEQ ID NO: 3741 - protein, 6 aa, Homo sapiens
VWELSK

SEQ ID NO: 3742 - protein, 21 aa, Homo sapiens
DALENIDPATQMMILNCIYFK

SEQ ID NO: 3743 - protein, 8 aa, Homo sapiens
DFVNASSK

SEQ ID NO: 3744 - protein, 19 aa, Homo sapiens
DFVNASSKYEITTIHNLFR

SEQ ID NO: 3745 - protein, 20 aa, Homo sapiens
DFVNASSKYEITTIHNLFRK

SEQ ID NO: 3746 - protein, 28 aa, Homo sapiens
DQVNTFDNIFIAPVGISTAMGMISLGLK

SEQ ID NO: 3747 - protein, 23 aa, Homo sapiens
ENTVTNDWIPEGEEDDDYLDLEK

SEQ ID NO: 3748 - protein, 20 aa, Homo sapiens
EYYFAEAQIADFSDPAFISK

SEQ ID NO: 3749 - protein, 7 aa, Homo sapiens
FAFNLYR

SEQ ID NO: 3750 - protein, 12 aa, Homo sapiens
FPVEMTHNHNFR

SEQ ID NO: 3751 - protein, 15 aa, Homo sapiens
FTVDRPFLFLIYEHR

SEQ ID NO: 3752 - protein, 14 aa, Homo sapiens
GETHEQVHSILHFK

SEQ ID NO: 3753 - protein, 22 aa, Homo sapiens
GETHEQVHSILHFKDFVNASSK

SEQ ID NO: 3754 - protein, 33 aa, Homo sapiens
GETHEQVHSILHFKDFVNASSKYEITTIHNLFR

SEQ ID NO: 3755 - protein, 18 aa, Homo sapiens
GGETAQSADPQWEQLNNK

SEQ ID NO: 3756 - protein, 31 aa, Homo sapiens
GGETAQSADPQWEQLNNKNLSMPLLPADFHK

SEQ ID NO: 3757 - protein, 33 aa, Homo sapiens
GNFLAANDQELDCDILQLEYVGGISMLIVVPHK

SEQ ID NO: 3758 - protein, 8 aa, Homo sapiens
GPLDQLEK

SEQ ID NO: 3759 - protein, 30 aa, Homo sapiens
HQGTITVNEEGTQATTVTTVGFMPLSTQVR

SEQ ID NO: 3760 - protein, 7 aa, Homo sapiens
IAIDLFK

SEQ ID NO: 3761 - protein, 36 aa, Homo sapiens
IFSEDDDYIDIVDSLSVSPTDSDVSAGNILQLFHGK

SEQ ID NO: 3762 - protein, 7 aa, Homo sapiens
LNILNAK

SEQ ID NO: 3763 - protein, 7 aa, Homo sapiens
NFGYTLR

SEQ ID NO: 3764 - protein, 11 aa, Homo sapiens
NGNMAGISDQR

SEQ ID NO: 3765 - protein, 13 aa, Homo sapiens
NLSMPLLPADFHK

SEQ ID NO: 3766 - protein, 9 aa, Homo sapiens
NYNLVESLK

SEQ ID NO: 3767 - protein, 10 aa, Homo sapiens
PFLFLIYEHR

SEQ ID NO: 3768 - protein, 9 aa, Homo sapiens
QFPILLDFK

SEQ ID NO: 3769 - protein, 9 aa, Homo sapiens
SVNDLYIQK

SEQ ID NO: 3770 - protein, 9 aa, Homo sapiens
TLEAQLTPR

SEQ ID NO: 3771 - protein, 9 aa, Homo sapiens
TSCLLFMGR

SEQ ID NO: 3772 - protein, 31 aa, Homo sapiens
VLKDQVNTFDNIFIAPVGISTAMGMISLGLK

SEQ ID NO: 3773 - protein, 22 aa, Homo sapiens
VREYYFAEAQIADFSDPAFISK

SEQ ID NO: 3774 - protein, 11 aa, Homo sapiens
YEITTIHNLFR

SEQ ID NO: 3775 - protein, 23 aa, Homo sapiens
AKVGQLQLSHNLSLVILVPQNLK

SEQ ID NO: 3776 - protein, 21 aa, Homo sapiens
ASSNPNATSSSSQDPESLQDR

SEQ ID NO: 3777 - protein, 10 aa, Homo sapiens
DFTCVHQALK

SEQ ID NO: 3778 - protein, 15 aa, Homo sapiens
DFTCVHQALKGFTTK

SEQ ID NO: 3779 - protein, 8 aa, Homo sapiens
DTFVNASR

SEQ ID NO: 3780 - protein, 16 aa, Homo sapiens
DTFVNASRTLYSSSPR

SEQ ID NO: 3781 - protein, 7 aa, Homo sapiens
FPVFMGR

SEQ ID NO: 3782 - protein, 10 aa, Homo sapiens
FQPTLLTLPR

SEQ ID NO: 3783 - protein, 17 aa, Homo sapiens
GVTSVSQIFHSPDLAIR

SEQ ID NO: 3784 - protein, 25 aa, Homo sapiens
GVTSVSQIFHSPDLAIRDTFVNASR

SEQ ID NO: 3785 - protein, 16 aa, Homo sapiens
HRLEDMEQALSPSVFK

SEQ ID NO: 3786 - protein, 15 aa, Homo sapiens
IKVTTSQDMLSIMEK

SEQ ID NO: 3787 - protein, 29 aa, Homo sapiens
KVETNMAFSPFSIASLLTQVLLGAGENTK

SEQ ID NO: 3788 - protein, 13 aa, Homo sapiens
KYPVAHFIDQTLK

SEQ ID NO: 3789 - protein, 14 aa, Homo sapiens
LEDMEQALSPSVFK

SEQ ID NO: 3790 - protein, 51 aa, Homo sapiens
LEFFDFSYDLNLCGLTEDPDLQVSAMQHQTVLELTETGVEAAAASAISVAR

SEQ ID NO: 3791 - protein, 15 aa, Homo sapiens
LEMSKFQPTLLTLPR

SEQ ID NO: 3792 - protein, 10 aa, Homo sapiens
LLDSLPSDTR

SEQ ID NO: 3793 - protein, 22 aa, Homo sapiens
LLDSLPSDTRLVLLNAIYLSAK

SEQ ID NO: 3794 - protein, 12 aa, Homo sapiens
LVLLNAIYLSAK

SEQ ID NO: 3795 - protein, 9 aa, Homo sapiens
LYHAFSAMK

SEQ ID NO: 3796 - protein, 7 aa, Homo sapiens
MEPFHFK

SEQ ID NO: 3797 - protein, 25 aa, Homo sapiens
MLFVEPILEVSSLPTTNSTTNSATK

SEQ ID NO: 3798 - protein, 12 aa, Homo sapiens
NSVIKVPMMNSK

SEQ ID NO: 3799 - protein, 21 aa, Homo sapiens
TLLVFEVQQPFLFVLWDQQHK

SEQ ID NO: 3800 - protein, 28 aa, Homo sapiens
TLLVFEVQQPFLFVLWDQQHKFPVFMGR

SEQ ID NO: 3801 - protein, 8 aa, Homo sapiens
TLYSSSPR

SEQ ID NO: 3802 - protein, 27 aa, Homo sapiens
TLYSSSPRVLSNNSDANLELINTWVAK

SEQ ID NO: 3803 - protein, 11 aa, Homo sapiens
TNLESILSYPK

SEQ ID NO: 3804 - protein, 21 aa, Homo sapiens
TNLESILSYPKDFTCVHQALK

SEQ ID NO: 3805 - protein, 28 aa, Homo sapiens
VETNMAFSPFSIASLLTQVLLGAGENTK

SEQ ID NO: 3806 - protein, 21 aa, Homo sapiens
VGQLQLSHNLSLVILVPQNLK

SEQ ID NO: 3807 - protein, 19 aa, Homo sapiens
VLSNNSDANLELINTWVAK

SEQ ID NO: 3808 - protein, 24 aa, Homo sapiens
VLSNNSDANLELINTWVAKNTNNK

SEQ ID NO: 3809 - protein, 13 aa, Homo sapiens
VTTSQDMLSIMEK

SEQ ID NO: 3810 - protein, 12 aa, Homo sapiens
YPVAHFIDQTLK

SEQ ID NO: 3811 - protein, 21 aa, Homo sapiens
ALNPSQTSMSGTLELPNIGAR

SEQ ID NO: 3812 - protein, 18 aa, Homo sapiens
DGEIPYYAEVVATNNPDR

SEQ ID NO: 3813 - protein, 24 aa, Homo sapiens
LNLEVTALIEKPDIHFLEPLESGR

SEQ ID NO: 3814 - protein, 33 aa, Homo sapiens
LSCSLPGSCEAGPPLTFSWTGNALSPLDPETTR

SEQ ID NO: 3815 - protein, 10 aa, Homo sapiens
MEDTGSYFFR

SEQ ID NO: 3816 - protein, 10 aa, Homo sapiens
NCSLSIGDAR

SEQ ID NO: 3817 - protein, 22 aa, Homo sapiens
SSELTLTPRPEDHGTNLTCQVK

SEQ ID NO: 3818 - protein, 14 aa, Homo sapiens
SWYSSPPLYVYWFR

SEQ ID NO: 3819 - protein, 16 aa, Homo sapiens
CTATSLIPVGPIQWFR

SEQ ID NO: 3820 - protein, 16 aa, Homo sapiens
IGNITPADAGTYYCVK

SEQ ID NO: 3821 - protein, 12 aa, Homo sapiens
AENQVNVTCQVR

SEQ ID NO: 3822 - protein, 18 aa, Homo sapiens
DGTYNWMSWLLVNVSAHR

SEQ ID NO: 3823 - protein, 10 aa, Homo sapiens
GTANLSETIR

SEQ ID NO: 3824 - protein, 13 aa, Homo sapiens
LQLTWLENGNVSR

SEQ ID NO: 3825 - protein, 17 aa, Homo sapiens
AIPVAQDLNAPSDWDSR

SEQ ID NO: 3826 - protein, 19 aa, Homo sapiens
EFHSHEFHSHEDMLVVDPK

SEQ ID NO: 3827 - protein, 9 aa, Homo sapiens
GDSVVYGLR

SEQ ID NO: 3828 - protein, 13 aa, Homo sapiens
ISHELDSASSEVN

SEQ ID NO: 3829 - protein, 19 aa, Homo sapiens
QNLLAPQNAVSSEETNDFK

SEQ ID NO: 3830 - protein, 26 aa, Homo sapiens
QNLLAPQNAVSSEETNDFKQETLPSK

SEQ ID NO: 3831 - protein, 28 aa, Homo sapiens
RPDIQYPDATDEDITSHMESEELNGAYK

SEQ ID NO: 3832 - protein, 16 aa, Homo sapiens
YPDAVATWLNPDPSQK

SEQ ID NO: 3833 - protein, 27 aa, Homo sapiens
ALHEDLPSGSFIQDDMVHCSYLCDEGK

SEQ ID NO: 3834 - protein, 17 aa, Homo sapiens
APPACHLVFCGEPPAIK

SEQ ID NO: 3835 - protein, 14 aa, Homo sapiens
CALLLQEIPAISYR

SEQ ID NO: 3836 - protein, 18 aa, Homo sapiens
CLEGYTMDTDTDTFTCQK

SEQ ID NO: 3837 - protein, 15 aa, Homo sapiens
CLPSQQWNDSFPVCK

SEQ ID NO: 3838 - protein, 18 aa, Homo sapiens
CLSNGSWSGSSPSCLPCR

SEQ ID NO: 3839 - protein, 12 aa, Homo sapiens
CMEGFVLNTSAK

SEQ ID NO: 3840 - protein, 21 aa, Homo sapiens
CPLPENITHILVHGDDFSVNR

SEQ ID NO: 3841 - protein, 20 aa, Homo sapiens
CSTPVIEYGTVNGTDFDCGK

SEQ ID NO: 3842 - protein, 17 aa, Homo sapiens
CVAPYQCDCPPGWTGSR

SEQ ID NO: 3843 - protein, 12 aa, Homo sapiens
DAVITGNNFTFR

SEQ ID NO: 3844 - protein, 18 aa, Homo sapiens
EEHCYLLHSFEEFEALAR

SEQ ID NO: 3845 - protein, 11 aa, Homo sapiens
EFYVDQNVSIK

SEQ ID NO: 3846 - protein, 25 aa, Homo sapiens
EGFLLQGHGIITCNPDETWTQTSAK

SEQ ID NO: 3847 - protein, 16 aa, Homo sapiens
EIEYTCNEGFLLEGAR

SEQ ID NO: 3848 - protein, 21 aa, Homo sapiens
ESSCLANSSWSHSPPVCEPVK

SEQ ID NO: 3849 - protein, 10 aa, Homo sapiens
FAAGSVVSFK

SEQ ID NO: 3850 - protein, 11 aa, Homo sapiens
FSEAFETTLGK

SEQ ID NO: 3851 - protein, 14 aa, Homo sapiens
GAFQQAAQILLHAR

SEQ ID NO: 3852 - protein, 16 aa, Homo sapiens
GAVNISACGVPCPEGK

SEQ ID NO: 3853 - protein, 30 aa, Homo sapiens
GEGFSPAESFVGSISQLNLWDYVLSPQQVK

SEQ ID NO: 3854 - protein, 16 aa, Homo sapiens
GNVLAWPDFLSGIVGK

SEQ ID NO: 3855 - protein, 25 aa, Homo sapiens
GSNYTYLSTLYYECDPGYVLNGTER

SEQ ID NO: 3856 - protein, 43 aa, Homo sapiens
GSPCEIPFTPVNGDFICTPDNTGVNCTLTCLEGYDFTEGSTDK

SEQ ID NO: 3857 - protein, 38 aa, Homo sapiens
GVWSQPYPVCEPLSCGSPPSVANAVATGEAHTYESEVK

SEQ ID NO: 3858 - protein, 29 aa, Homo sapiens
GYTLAGDKESSCLANSSWSHSPPVCEPVK

SEQ ID NO: 3859 - protein, 14 aa, Homo sapiens
IGSYQDEEGQLECK

SEQ ID NO: 3860 - protein, 15 aa, Homo sapiens
ISCGPPAHVENAIAR

SEQ ID NO: 3861 - protein, 22 aa, Homo sapiens
KCPLPENITHILVHGDDFSVNR

SEQ ID NO: 3862 - protein, 15 aa, Homo sapiens
LIFNITASVPLPDER

SEQ ID NO: 3863 - protein, 26 aa, Homo sapiens
LIFNITASVPLPDERNDTLEWENQQR

SEQ ID NO: 3864 - protein, 11 aa, Homo sapiens
LLQTLETITNK

SEQ ID NO: 3865 - protein, 13 aa, Homo sapiens
LLSDFPVVPTATR

SEQ ID NO: 3866 - protein, 22 aa, Homo sapiens
MCVNCPLGTYYNLEHFTCESCR

SEQ ID NO: 3867 - protein, 15 aa, Homo sapiens
MVPSFCSDAEDIDCR

SEQ ID NO: 3868 - protein, 26 aa, Homo sapiens
NWDEDEPICIPVDCSSPPVSANGQVR

SEQ ID NO: 3869 - protein, 23 aa, Homo sapiens
PGFELVGNTTTLCGENGHWLGGK

SEQ ID NO: 3870 - protein, 26 aa, Homo sapiens
SDQQCLAVSCDEPPIVDHASPETAHR

SEQ ID NO: 3871 - protein, 16 aa, Homo sapiens
SGYVIQGSSDLICTEK

SEQ ID NO: 3872 - protein, 27 aa, Homo sapiens
SHTQGDLFPQGETIVQYTATDPSGNNR

SEQ ID NO: 3873 - protein, 16 aa, Homo sapiens
SVCLENGTWTSPPICR

SEQ ID NO: 3874 - protein, 18 aa, Homo sapiens
TLEQQDSANVTWQIPTAK

SEQ ID NO: 3875 - protein, 19 aa, Homo sapiens
VCLANGSWSGATPDCVPVR

SEQ ID NO: 3876 - protein, 13 aa, Homo sapiens
VIDAEPPVIDWCR

SEQ ID NO: 3877 - protein, 23 aa, Homo sapiens
YYCAYEDGVWKPTYTTEWPDCAK

SEQ ID NO: 3878 - protein, 15 aa, Homo sapiens
ADRDQYELLCLDNTR

SEQ ID NO: 3879 - protein, 16 aa, Homo sapiens
ADRDQYELLCLDNTRK

SEQ ID NO: 3880 - protein, 28 aa, Homo sapiens
AIAANEADAVTLDAGLVYDAYLAPNNLK

SEQ ID NO: 3881 - protein, 38 aa, Homo sapiens
AIAANEADAVTLDAGLVYDAYLAPNNLKPVVAEFYGSK

SEQ ID NO: 3882 - protein, 52 aa, Homo sapiens
AIAANEADAVTLDAGLVYDAYLAPNNLKPVVAEFYGSKEDPQTFYYAVAVVK

SEQ ID NO: 3883 - protein, 9 aa, Homo sapiens
APNHAVVTR

SEQ ID NO: 3884 - protein, 8 aa, Homo sapiens
ASYLDCIR

SEQ ID NO: 3885 - protein, 45 aa, Homo sapiens
AVANFFSGSCAPCADGTDFPQLCQLCPGCGCSTLNQYFGYSGAFK

SEQ ID NO: 3886 - protein, 20 aa, Homo sapiens
AVGNLRKCSTSSLLEACTFR

SEQ ID NO: 3887 - protein, 11 aa, Homo sapiens
CDEWSVNSVGK

SEQ ID NO: 3888 - protein, 26 aa, Homo sapiens
CDEWSVNSVGKIECVSAETTEDCIAK

SEQ ID NO: 3889 - protein, 13 aa, Homo sapiens
CGLVPVLAENYNK

SEQ ID NO: 3890 - protein, 13 aa, Homo sapiens
CLKDGAGDVAFVK

SEQ ID NO: 3891 - protein, 12 aa, Homo sapiens
CLVEKGDVAFVK

SEQ ID NO: 3892 - protein, 13 aa, Homo sapiens
CSTSSLLEACTFR

SEQ ID NO: 3893 - protein, 15 aa, Homo sapiens
DCHLAQVPSHTVVAR

SEQ ID NO: 3894 - protein, 8 aa, Homo sapiens
DDTVCLAK

SEQ ID NO: 3895 - protein, 10 aa, Homo sapiens
DGAGDVAFVK

SEQ ID NO: 3896 - protein, 21 aa, Homo sapiens
DGAGDVAFVKHSTIFENLANK

SEQ ID NO: 3897 - protein, 18 aa, Homo sapiens
DHMKSVIPSDGPSVACVK

SEQ ID NO: 3898 - protein, 13 aa, Homo sapiens
DLLFKDSAHGFLK

SEQ ID NO: 3899 - protein, 13 aa, Homo sapiens
DLLFRDDTVCLAK

SEQ ID NO: 3900 - protein, 12 aa, Homo sapiens
DQYELLCLDNTR

SEQ ID NO: 3901 - protein, 8 aa, Homo sapiens
DSAHGFLK

SEQ ID NO: 3902 - protein, 10 aa, Homo sapiens
DSGFQMNQLR

SEQ ID NO: 3903 - protein, 11 aa, Homo sapiens
DYELLCLDGTR

SEQ ID NO: 3904 - protein, 12 aa, Homo sapiens
DYELLCLDGTRK

SEQ ID NO: 3905 - protein, 24 aa, Homo sapiens
DYELLCLDGTRKPVEEYANCHLAR

SEQ ID NO: 3906 - protein, 17 aa, Homo sapiens
EDLIWELLNQAQEHFGK

SEQ ID NO: 3907 - protein, 19 aa, Homo sapiens
EDLIWELLNQAQEHFGKDK

SEQ ID NO: 3908 - protein, 14 aa, Homo sapiens
EDPQTFYYAVAVVK

SEQ ID NO: 3909 - protein, 15 aa, Homo sapiens
EDPQTFYYAVAVVKK

SEQ ID NO: 3910 - protein, 11 aa, Homo sapiens
EFQLFSSPHGK

SEQ ID NO: 3911 - protein, 16 aa, Homo sapiens
EFQLFSSPHGKDLLFK

SEQ ID NO: 3912 - protein, 24 aa, Homo sapiens
EFQLFSSPHGKDLLFKDSAHGFLK

SEQ ID NO: 3913 - protein, 13 aa, Homo sapiens
EGTCPEAPTDECK

SEQ ID NO: 3914 - protein, 16 aa, Homo sapiens
EGTCPEAPTDECKPVK

SEQ ID NO: 3915 - protein, 25 aa, Homo sapiens
EGTCPEAPTDECKPVKWCALSHHER

SEQ ID NO: 3916 - protein, 11 aa, Homo sapiens
EGYYGYTGAFR

SEQ ID NO: 3917 - protein, 14 aa, Homo sapiens
FDEFFSEGCAPGSK

SEQ ID NO: 3918 - protein, 15 aa, Homo sapiens
FDEFFSEGCAPGSKK

SEQ ID NO: 3919 - protein, 21 aa, Homo sapiens
FDEFFSEGCAPGSKKDSSLCK

SEQ ID NO: 3920 - protein, 7 aa, Homo sapiens
GDVAFVK

SEQ ID NO: 3921 - protein, 11 aa, Homo sapiens
HQTVPQNTGGK

SEQ ID NO: 3922 - protein, 11 aa, Homo sapiens
HSTIFENLANK

SEQ ID NO: 3923 - protein, 14 aa, Homo sapiens
HSTIFENLANKADR

SEQ ID NO: 3924 - protein, 26 aa, Homo sapiens
HSTIFENLANKADRDQYELLCLDNTR

SEQ ID NO: 3925 - protein, 15 aa, Homo sapiens
IECVSAETTEDCIAK

SEQ ID NO: 3926 - protein, 24 aa, Homo sapiens
ILRQQQHLFGSNVTDCSGNFCLFR

SEQ ID NO: 3927 - protein, 21 aa, Homo sapiens
IMNGEADAMSLDGGFVYIAGK

SEQ ID NO: 3928 - protein, 34 aa, Homo sapiens
IMNGEADAMSLDGGFVYIAGKCGLVPVLAENYNK

SEQ ID NO: 3929 - protein, 19 aa, Homo sapiens
INHCRFDEFFSEGCAPGSK

SEQ ID NO: 3930 - protein, 20 aa, Homo sapiens
INHCRFDEFFSEGCAPGSKK

SEQ ID NO: 3931 - protein, 9 aa, Homo sapiens
KASYLDCIR

SEQ ID NO: 3932 - protein, 14 aa, Homo sapiens
KCSTSSLLEACTFR

SEQ ID NO: 3933 - protein, 11 aa, Homo sapiens
KDSGFQMNQLR

SEQ ID NO: 3934 - protein, 22 aa, Homo sapiens
KPVDEYKDCHLAQVPSHTVVAR

SEQ ID NO: 3935 - protein, 13 aa, Homo sapiens
KPVEEYANCHLAR

SEQ ID NO: 3936 - protein, 12 aa, Homo sapiens
KSASDLTWDNLK

SEQ ID NO: 3937 - protein, 15 aa, Homo sapiens
LCMGSGLNLCEPNNK

SEQ ID NO: 3938 - protein, 26 aa, Homo sapiens
LCMGSGLNLCEPNNKEGYYGYTGAFR

SEQ ID NO: 3939 - protein, 17 aa, Homo sapiens
LHDRNTYEKYLGEEYVK

SEQ ID NO: 3940 - protein, 13 aa, Homo sapiens
LKCDEWSVNSVGK

SEQ ID NO: 3941 - protein, 28 aa, Homo sapiens
LKCDEWSVNSVGKIECVSAETTEDCIAK

SEQ ID NO: 3942 - protein, 12 aa, Homo sapiens
MYLGYEYVTAIR

SEQ ID NO: 3943 - protein, 15 aa, Homo sapiens
MYLGYEYVTAIRNLR

SEQ ID NO: 3944 - protein, 16 aa, Homo sapiens
NLNEKDYELLCLDGTR

SEQ ID NO: 3945 - protein, 17 aa, Homo sapiens
NLNEKDYELLCLDGTRK

SEQ ID NO: 3946 - protein, 7 aa, Homo sapiens
NPDPWAK

SEQ ID NO: 3947 - protein, 12 aa, Homo sapiens
NPDPWAKNLNEK

SEQ ID NO: 3948 - protein, 13 aa, Homo sapiens
NTYEKYLGEEYVK

SEQ ID NO: 3949 - protein, 21 aa, Homo sapiens
PVDEYKDCHLAQVPSHTVVAR

SEQ ID NO: 3950 - protein, 12 aa, Homo sapiens
PVEEYANCHLAR

SEQ ID NO: 3951 - protein, 10 aa, Homo sapiens
PVVAEFYGSK

SEQ ID NO: 3952 - protein, 21 aa, Homo sapiens
QQQHLFGSNVTDCSGNFCLFR

SEQ ID NO: 3953 - protein, 25 aa, Homo sapiens
QQQHLFGSNVTDCSGNFCLFRSETK

SEQ ID NO: 3954 - protein, 19 aa, Homo sapiens
SAGWNIPIGLLYCDLPEPR

SEQ ID NO: 3955 - protein, 20 aa, Homo sapiens
SAGWNIPIGLLYCDLPEPRK

SEQ ID NO: 3956 - protein, 11 aa, Homo sapiens
SASDLTWDNLK

SEQ ID NO: 3957 - protein, 8 aa, Homo sapiens
SCHTAVGR

SEQ ID NO: 3958 - protein, 27 aa, Homo sapiens
SCHTGLGRSAGWNIPIGLLYCDLPEPR

SEQ ID NO: 3959 - protein, 19 aa, Homo sapiens
SDNCEDTPEAGYFAIAVVK

SEQ ID NO: 3960 - protein, 17 aa, Homo sapiens
SETKDLLFRDDTVCLAK

SEQ ID NO: 3961 - protein, 13 aa, Homo sapiens
SKEFQLFSSPHGK

SEQ ID NO: 3962 - protein, 18 aa, Homo sapiens
SKEFQLFSSPHGKDLLFK

SEQ ID NO: 3963 - protein, 22 aa, Homo sapiens
SMGGKEDLIWELLNQAQEHFGK

SEQ ID NO: 3964 - protein, 24 aa, Homo sapiens
SMGGKEDLIWELLNQAQEHFGKDK

SEQ ID NO: 3965 - protein, 14 aa, Homo sapiens
SVIPSDGPSVACVK

SEQ ID NO: 3966 - protein, 15 aa, Homo sapiens
SVIPSDGPSVACVKK

SEQ ID NO: 3967 - protein, 14 aa, Homo sapiens
TAGWNIPMGLLYNK

SEQ ID NO: 3968 - protein, 19 aa, Homo sapiens
TAGWNIPMGLLYNKINHCR

SEQ ID NO: 3969 - protein, 9 aa, Homo sapiens
WCALSHHER

SEQ ID NO: 3970 - protein, 11 aa, Homo sapiens
WCAVSEHEATK

SEQ ID NO: 3971 - protein, 16 aa, Homo sapiens
WCAVSEHEATKCQSFR

SEQ ID NO: 3972 - protein, 8 aa, Homo sapiens
YLGEEYVK

SEQ ID NO: 3973 - protein, 17 aa, Homo sapiens
AKFVGTPEVNQTTLYQR

SEQ ID NO: 3974 - protein, 11 aa, Homo sapiens
EPGLCTWQSLR

SEQ ID NO: 3975 - protein, 15 aa, Homo sapiens
FVGTPEVNQTTLYQR

SEQ ID NO: 3976 - protein, 16 aa, Homo sapiens
FVYTPAMESVCGYFHR

SEQ ID NO: 3977 - protein, 29 aa, Homo sapiens
FVYTPAMESVCGYFHRSHNRSEEFLIAGK

SEQ ID NO: 3978 - protein, 12 aa, Homo sapiens
GFQALGDAADIR

SEQ ID NO: 3979 - protein, 25 aa, Homo sapiens
LQDGLLHITTCSFVAPWNSLSLAQR

SEQ ID NO: 3980 - protein, 19 aa, Homo sapiens
LQSGTHCLWTDQLLQGSEK

SEQ ID NO: 3981 - protein, 9 aa, Homo sapiens
SEEFLIAGK

SEQ ID NO: 3982 - protein, 13 aa, Homo sapiens
SHNRSEEFLIAGK

SEQ ID NO: 3983 - protein, 20 aa, Homo sapiens
TYTVGCEECTVFPCLSIPCK

SEQ ID NO: 3984 - protein, 14 aa, Homo sapiens
AGTPYTVTLHGEVR

SEQ ID NO: 3985 - protein, 59 aa, Homo sapiens
ASTAKEPEIGNLNVSDITPESFNLSWMATDGIFETFTIEIIDSNRLLETVEYNISGAER

SEQ ID NO: 3986 - protein, 23 aa, Homo sapiens
ASTEQAPELENLTVTEVGWDGLR

SEQ ID NO: 3987 - protein, 14 aa, Homo sapiens
AVDIPGLEAATPYR

SEQ ID NO: 3988 - protein, 20 aa, Homo sapiens
CEEGQCVCDEGFAGVDCSEK

SEQ ID NO: 3989 - protein, 19 aa, Homo sapiens
CICNEGYSGEDCSEVSPPK

SEQ ID NO: 3990 - protein, 19 aa, Homo sapiens
CINGTCYCEEGFTGEDCGK

SEQ ID NO: 3991 - protein, 29 aa, Homo sapiens
CVENECVCDEGFTGEDCSELICPNDCFDR

SEQ ID NO: 3992 - protein, 21 aa, Homo sapiens
CVNGQCVCDEGYTGEDCSQLR

SEQ ID NO: 3993 - protein, 12 aa, Homo sapiens
DHGETAFAVYDK

SEQ ID NO: 3994 - protein, 28 aa, Homo sapiens
DLAPPSEPSESFQEHTVDGENQIVFTHR

SEQ ID NO: 3995 - protein, 13 aa, Homo sapiens
DVTDTTALITWFK

SEQ ID NO: 3996 - protein, 28 aa, Homo sapiens
DVTDTTALITWFKPLAEIDGIELTYGIK

SEQ ID NO: 3997 - protein, 14 aa, Homo sapiens
EATEYEIELYGISK

SEQ ID NO: 3998 - protein, 20 aa, Homo sapiens
EDKESNPATINAATELDTPK

SEQ ID NO: 3999 - protein, 12 aa, Homo sapiens
EEFWLGLDNLNK

SEQ ID NO: 4000 - protein, 40 aa, Homo sapiens
EPEIGNLNVSDITPESFNLSWMATDGIFETFTIEIIDSNR

SEQ ID NO: 4001 - protein, 17 aa, Homo sapiens
ESNPATINAATELDTPK

SEQ ID NO: 4002 - protein, 11 aa, Homo sapiens
ETFTTGLDAPR

SEQ ID NO: 4003 - protein, 23 aa, Homo sapiens
ETSVEVEWDPLDIAFETWEIIFR

SEQ ID NO: 4004 - protein, 25 aa, Homo sapiens
EVIVGPDTTSYSLADLSPSTHYTAK

SEQ ID NO: 4005 - protein, 35 aa, Homo sapiens
GFEESEPVSGSFTTALDGPSGLVTANITDSEALAR

SEQ ID NO: 4006 - protein, 33 aa, Homo sapiens
GHSTRPLAVEVVTEDLPQLGDLAVSEVGWDGLR

SEQ ID NO: 4007 - protein, 16 aa, Homo sapiens
GLEPGQEYNVLLTAEK

SEQ ID NO: 4008 - protein, 17 aa, Homo sapiens
GNFSTEGCGCVCEPGWK

SEQ ID NO: 4009 - protein, 37 aa, Homo sapiens
GVTQDFSTTPLSVEVLTEEVPDMGNLTVTEVSWDALR

SEQ ID NO: 4010 - protein, 10 aa, Homo sapiens
ITAQGQYELR

SEQ ID NO: 4011 - protein, 20 aa, Homo sapiens
ITYVPITGGTPSMVTVDGTK

SEQ ID NO: 4012 - protein, 15 aa, Homo sapiens
KQSEPLEITLLAPER

SEQ ID NO: 4013 - protein, 10 aa, Homo sapiens
LDAPSQIEVK

SEQ ID NO: 4014 - protein, 12 aa, Homo sapiens
LEELENLVSSLR

SEQ ID NO: 4015 - protein, 15 aa, Homo sapiens
LIPGVEYLVSIIAMK

SEQ ID NO: 4016 - protein, 14 aa, Homo sapiens
LLDPQEFTLSGTQR

SEQ ID NO: 4017 - protein, 14 aa, Homo sapiens
LLETVEYNISGAER

SEQ ID NO: 4018 - protein, 22 aa, Homo sapiens
LNWTAADNAYEHFVIQVQEVNK

SEQ ID NO: 4019 - protein, 22 aa, Homo sapiens
LNWTAADQAYEHFIIQVQEANK

SEQ ID NO: 4020 - protein, 17 aa, Homo sapiens
LNYSLPTGQWVGVQLPR

SEQ ID NO: 4021 - protein, 18 aa, Homo sapiens
LPVGSQCSVDLESASGEK

SEQ ID NO: 4022 - protein, 16 aa, Homo sapiens
LSWTADEGVFDNFVLK

SEQ ID NO: 4023 - protein, 9 aa, Homo sapiens
NLTVPGSLR

SEQ ID NO: 4024 - protein, 15 aa, Homo sapiens
PLAEIDGIELTYGIK

SEQ ID NO: 4025 - protein, 28 aa, Homo sapiens
PLAVEVVTEDLPQLGDLAVSEVGWDGLR

SEQ ID NO: 4026 - protein, 24 aa, Homo sapiens
QSGVNATLPEENQPVVFNHVYNIK

SEQ ID NO: 4027 - protein, 18 aa, Homo sapiens
QTGLAPGQEYEISLHIVK

SEQ ID NO: 4028 - protein, 21 aa, Homo sapiens
SFSTFDKDTDSAITNCALSYK

SEQ ID NO: 4029 - protein, 19 aa, Homo sapiens
SNMIQTIFTTIGLLYPFPK

SEQ ID NO: 4030 - protein, 16 aa, Homo sapiens
SQTVSAIATTAMGSPK

SEQ ID NO: 4031 - protein, 25 aa, Homo sapiens
TAHISGLPPSTDFIVYLSGLAPSIR

SEQ ID NO: 4032 - protein, 28 aa, Homo sapiens
TISATATTEAEPEVDNLLVSDATPDGFR

SEQ ID NO: 4033 - protein, 30 aa, Homo sapiens
TPVLSAEASTGETPNLGEVVVAEVGWDALK

SEQ ID NO: 4034 - protein, 30 aa, Homo sapiens
TTIDLTEDENQYSIGNLKPDTEYEVSLISR

SEQ ID NO: 4035 - protein, 20 aa, Homo sapiens
TTLTGLRPGTEYGIGVSAVK

SEQ ID NO: 4036 - protein, 23 aa, Homo sapiens
TVSGNTVEYALTDLEPATEYTLR

SEQ ID NO: 4037 - protein, 12 aa, Homo sapiens
VATYLPAPEGLK

SEQ ID NO: 4038 - protein, 14 aa, Homo sapiens
VEAAQNLTLPGSLR

SEQ ID NO: 4039 - protein, 22 aa, Homo sapiens
VPGDQTSTIIQELEPGVEYFIR

SEQ ID NO: 4040 - protein, 13 aa, Homo sapiens
VSQTDNSITLEWR

SEQ ID NO: 4041 - protein, 21 aa, Homo sapiens
VTEYLVVYTPTHEGGLEMQFR

SEQ ID NO: 4042 - protein, 19 aa, Homo sapiens
WQPAIATVDSYVISYTGEK

SEQ ID NO: 4043 - protein, 16 aa, Homo sapiens
YAPISGGDHAEVDVPK

SEQ ID NO: 4044 - protein, 16 aa, Homo sapiens
YGDNNHSQGVNWFHWK

SEQ ID NO: 4045 - protein, 31 aa, Homo sapiens
GTQGPEQQHLLITAPSSSSSSLESSASALDR

SEQ ID NO: 4046 - protein, 29 aa, Homo sapiens
PGTETSDVVCKPCAPGTFSNTTSSTDICR

SEQ ID NO: 4047 - protein, 56 aa, Homo sapiens
PGTETSDVVCKPCAPGTFSNTTSSTDICRPHQICNVVAIPGNASMDAVCTSTSPTR

SEQ ID NO: 4048 - protein, 13 aa, Homo sapiens
AADDTWEPFASGK

SEQ ID NO: 4049 - protein, 35 aa, Homo sapiens
AADDTWEPFASGKTSESGELHGLTTEEEFVEGIYK

SEQ ID NO: 4050 - protein, 23 aa, Homo sapiens
ALGISPFHEHAEVVFTANDSGPR

SEQ ID NO: 4051 - protein, 24 aa, Homo sapiens
ALGISPFHEHAEVVFTANDSGPRR

SEQ ID NO: 4052 - protein, 13 aa, Homo sapiens
GSPAINVAVHVFR

SEQ ID NO: 4053 - protein, 14 aa, Homo sapiens
KAADDTWEPFASGK

SEQ ID NO: 4054 - protein, 23 aa, Homo sapiens
RYTIAALLSPYSYSTTAVVTNPK

SEQ ID NO: 4055 - protein, 24 aa, Homo sapiens
RYTIAALLSPYSYSTTAVVTNPKE

SEQ ID NO: 4056 - protein, 22 aa, Homo sapiens
TSESGELHGLTTEEEFVEGIYK

SEQ ID NO: 4057 - protein, 28 aa, Homo sapiens
TSESGELHGLTTEEEFVEGIYKVEIDTK

SEQ ID NO: 4058 - protein, 22 aa, Homo sapiens
YTIAALLSPYSYSTTAVVTNPK

SEQ ID NO: 4059 - protein, 23 aa, Homo sapiens
YTIAALLSPYSYSTTAVVTNPKE

SEQ ID NO: 4060 - protein, 11 aa, Homo sapiens
CSVADVYPFDR

SEQ ID NO: 4061 - protein, 21 aa, Homo sapiens
DPEIEMSGGLVNGSSVTVSCK

SEQ ID NO: 4062 - protein, 14 aa, Homo sapiens
DPEIHLSGPLEAGK

SEQ ID NO: 4063 - protein, 19 aa, Homo sapiens
DPEIHLSGPLEAGKPITVK

SEQ ID NO: 4064 - protein, 31 aa, Homo sapiens
DTTVLVSPSSILEEGSSVNMTCLSQGFPAPK

SEQ ID NO: 4065 - protein, 22 aa, Homo sapiens
EGDTVIISCTCGNVPETWIILK

SEQ ID NO: 4066 - protein, 9 aa, Homo sapiens
ELQVYISPK

SEQ ID NO: 4067 - protein, 11 aa, Homo sapiens
EVELIIQVTPK

SEQ ID NO: 4068 - protein, 20 aa, Homo sapiens
EVELIVQEKPFTVEISPGPR

SEQ ID NO: 4069 - protein, 9 aa, Homo sapiens
EVELIVQEK

SEQ ID NO: 4070 - protein, 20 aa, Homo sapiens
EVELIVQEKPFTVEISPGPR

SEQ ID NO: 4071 - protein, 17 aa, Homo sapiens
GETILENIEFLEDTDMK

SEQ ID NO: 4072 - protein, 11 aa, Homo sapiens
GIQVEIYSFPK

SEQ ID NO: 4073 - protein, 11 aa, Homo sapiens
GIQVELYSFPR

SEQ ID NO: 4074 - protein, 32 aa, Homo sapiens
GIQVELYSFPRDPEIEMSGGLVNGSSVTVSCK

SEQ ID NO: 4075 - protein, 22 aa, Homo sapiens
KLDNGNLQHLSGNATLTLIAMR

SEQ ID NO: 4076 - protein, 21 aa, Homo sapiens
LDNGNLQHLSGNATLTLIAMR

SEQ ID NO: 4077 - protein, 7 aa, Homo sapiens
LEIDLLK

SEQ ID NO: 4078 - protein, 7 aa, Homo sapiens
LEIELLK

SEQ ID NO: 4079 - protein, 11 aa, Homo sapiens
LHIDDMEFEPK

SEQ ID NO: 4080 - protein, 13 aa, Homo sapiens
LHIDEMDSVPTVR

SEQ ID NO: 4081 - protein, 25 aa, Homo sapiens
LQEGGSVTMTCSSEGLPAPEIFWSK

SEQ ID NO: 4082 - protein, 17 aa, Homo sapiens
MEDSGIYVCEGVNLIGK

SEQ ID NO: 4083 - protein, 17 aa, Homo sapiens
MEDSGVYLCEGINQAGR

SEQ ID NO: 4084 - protein, 11 aa, Homo sapiens
NTVISVNPSTK

SEQ ID NO: 4085 - protein, 11 aa, Homo sapiens
PFTVEISPGPR

SEQ ID NO: 4086 - protein, 22 aa, Homo sapiens
QLPNGELQPLSENATLTLISTK

SEQ ID NO: 4087 - protein, 13 aa, Homo sapiens
QSTQTLYVNVAPR

SEQ ID NO: 4088 - protein, 30 aa, Homo sapiens
SEGTNSTLTLSPVSFENEHSYLCTVTCGHK

SEQ ID NO: 4089 - protein, 15 aa, Homo sapiens
SLEMTFIPTIEDTGK

SEQ ID NO: 4090 - protein, 15 aa, Homo sapiens
SLEVTFTPVIEDIGK

SEQ ID NO: 4091 - protein, 9 aa, Homo sapiens
SLTLDVQGR

SEQ ID NO: 4092 - protein, 10 aa, Homo sapiens
SQEFLEDADR

SEQ ID NO: 4093 - protein, 9 aa, Homo sapiens
VPSVYPLDR

SEQ ID NO: 4094 - protein, 32 aa, Homo sapiens
VRSEGTNSTLTLSPVSFENEHSYLCTVTCGHK

SEQ ID NO: 4095 - protein, 32 aa, Homo sapiens
VTNEGTTSTLTMNPVSFGNEHSYLCTATCESR

SEQ ID NO: 4096 - protein, 26 aa, Homo sapiens
YLAQIGDSVSLTCSTTGCESPFFSWR

SEQ ID NO: 4097 - protein, 21 aa, Homo sapiens
GDVNLPCTYDPLQGYTQVLVK

SEQ ID NO: 4098 - protein, 10 aa, Homo sapiens
GSDPVTIFLR

SEQ ID NO: 4099 - protein, 11 aa, Homo sapiens
GSPPISYIWYK

SEQ ID NO: 4100 - protein, 8 aa, Homo sapiens
ISLQCQAR

SEQ ID NO: 4101 - protein, 23 aa, Homo sapiens
LSVSKPTVTTGSGYGFTVPQGMR

SEQ ID NO: 4102 - protein, 15 aa, Homo sapiens
PAVIADSGSYFCTAK

SEQ ID NO: 4103 - protein, 18 aa, Homo sapiens
PTVTTGSGYGFTVPQGMR

SEQ ID NO: 4104 - protein, 19 aa, Homo sapiens
SHYTCEVTWQTPDGNQVVR

SEQ ID NO: 4105 - protein, 10 aa, Homo sapiens
VATLSTLLFK

SEQ ID NO: 4106 - protein, 17 aa, Homo sapiens
VPGDVSLQLSTLEMDDR

SEQ ID NO: 4107 - protein, 14 aa, Homo sapiens
AFVLSSVDELEQQR

SEQ ID NO: 4108 - protein, 9 aa, Homo sapiens
AFVVDMMER

SEQ ID NO: 4109 - protein, 12 aa, Homo sapiens
AHLLSLVDVMQR

SEQ ID NO: 4110 - protein, 8 aa, Homo sapiens
ALSVVWDR

SEQ ID NO: 4111 - protein, 21 aa, Homo sapiens
AMYSIDINDVQDQCSCCSPTR

SEQ ID NO: 4112 - protein, 11 aa, Homo sapiens
APTCGLCEVAR

SEQ ID NO: 4113 - protein, 9 aa, Homo sapiens
AVSPLPYLR

SEQ ID NO: 4114 - protein, 22 aa, Homo sapiens
AVVILVTDVSVDSVDAAADAAR

SEQ ID NO: 4115 - protein, 16 aa, Homo sapiens
CHPLVDPEPFVALCEK

SEQ ID NO: 4116 - protein, 14 aa, Homo sapiens
CLPSACEVVTGSPR

SEQ ID NO: 4117 - protein, 11 aa, Homo sapiens
CLPTACTIQLR

SEQ ID NO: 4118 - protein, 12 aa, Homo sapiens
CMVQVGVISGFK

SEQ ID NO: 4119 - protein, 31 aa, Homo sapiens
CVDGCSCPEGQLLDEGLCVESTECPCVHSGK

SEQ ID NO: 4120 - protein, 20 aa, Homo sapiens
DCQDHSFSIVIETVQCADDR

SEQ ID NO: 4121 - protein, 26 aa, Homo sapiens
DCQDHSFSIVIETVQCADDRDAVCTR

SEQ ID NO: 4122 - protein, 12 aa, Homo sapiens
DETHFEVVESGR

SEQ ID NO: 4123 - protein, 14 aa, Homo sapiens
DETLQDGCDTHFCK

SEQ ID NO: 4124 - protein, 9 aa, Homo sapiens
DGTVTTDWK

SEQ ID NO: 4125 - protein, 9 aa, Homo sapiens
EAPDLVLQR

SEQ ID NO: 4126 - protein, 17 aa, Homo sapiens
ECLCGALASYAAACAGR

SEQ ID NO: 4127 - protein, 8 aa, Homo sapiens
EEVFIQQR

SEQ ID NO: 4128 - protein, 9 aa, Homo sapiens
EFMEEVIQR

SEQ ID NO: 4129 - protein, 16 aa, Homo sapiens
EGGPSQIGDALGFAVR

SEQ ID NO: 4130 - protein, 9 aa, Homo sapiens
ENGYECEWR

SEQ ID NO: 4131 - protein, 20 aa, Homo sapiens
EQAPNLVYMVTGNPASDEIK

SEQ ID NO: 4132 - protein, 21 aa, Homo sapiens
EQAPNLVYMVTGNPASDEIKR

SEQ ID NO: 4133 - protein, 18 aa, Homo sapiens
EQDLEVILHNGACSPGAR

SEQ ID NO: 4134 - protein, 24 aa, Homo sapiens
FNHLGHIFTFTPQNNEFQLQLSPK

SEQ ID NO: 4135 - protein, 19 aa, Homo sapiens
FSEEACAVLTSPTFEACHR

SEQ ID NO: 4136 - protein, 7 aa, Homo sapiens
GEYFWEK

SEQ ID NO: 4137 - protein, 13 aa, Homo sapiens
GLQPTLTNPGECR

SEQ ID NO: 4138 - protein, 21 aa, Homo sapiens
GLQPTLTNPGECRPNFTCACR

SEQ ID NO: 4139 - protein, 10 aa, Homo sapiens
GLWEQCQLLK

SEQ ID NO: 4140 - protein, 12 aa, Homo sapiens
GLYLETEAGYYK

SEQ ID NO: 4141 - protein, 16 aa, Homo sapiens
GQVYLQCGTPCNLTCR

SEQ ID NO: 4142 - protein, 23 aa, Homo sapiens
HCDGNVSSCGDHPSEGCFCPPDK

SEQ ID NO: 4143 - protein, 18 aa, Homo sapiens
HGAGVAMDGQDVQLPLLK

SEQ ID NO: 4144 - protein, 11 aa, Homo sapiens
HIVTFDGQNFK

SEQ ID NO: 4145 - protein, 9 aa, Homo sapiens
HLSISVVLK

SEQ ID NO: 4146 - protein, 19 aa, Homo sapiens
HSALSVELHSDMEVTVNGR

SEQ ID NO: 4147 - protein, 14 aa, Homo sapiens
IDGSGNFQVLLSDR

SEQ ID NO: 4148 - protein, 17 aa, Homo sapiens
IEDLPTMVTLGNSFLHK

SEQ ID NO: 4149 - protein, 18 aa, Homo sapiens
IGWPNAPILIQDFETLPR

SEQ ID NO: 4150 - protein, 13 aa, Homo sapiens
ILAGPAGDSNVVK

SEQ ID NO: 4151 - protein, 23 aa, Homo sapiens
ILDELLQTCVDPEDCPVCEVAGR

SEQ ID NO: 4152 - protein, 12 aa, Homo sapiens
ILTSDVFQDCNK

SEQ ID NO: 4153 - protein, 20 aa, Homo sapiens
IPGTCCDTCEEPECNDITAR

SEQ ID NO: 4154 - protein, 13 aa, Homo sapiens
ITLLLMASQEPQR

SEQ ID NO: 4155 - protein, 16 aa, Homo sapiens
KVIVIPVGIGPHANLK

SEQ ID NO: 4156 - protein, 28 aa, Homo sapiens
KWNCTDHVCDATCSTIGMAHYLTFDGLK

SEQ ID NO: 4157 - protein, 13 aa, Homo sapiens
LLDLVFLLDGSSR

SEQ ID NO: 4158 - protein, 23 aa, Homo sapiens
LPGDIQVVPIGVGPNANVQELER

SEQ ID NO: 4159 - protein, 10 aa, Homo sapiens
LSEAEFEVLK

SEQ ID NO: 4160 - protein, 11 aa, Homo sapiens
LSGEAYGFVAR

SEQ ID NO: 4161 - protein, 14 aa, Homo sapiens
LSYGEDLQMDWDGR

SEQ ID NO: 4162 - protein, 13 aa, Homo sapiens
LTGSCSYVLFQNK

SEQ ID NO: 4163 - protein, 25 aa, Homo sapiens
LTQVSVLQYGSITTIDVPWNVVPEK

SEQ ID NO: 4164 - protein, 9 aa, Homo sapiens
LVCPADNLR

SEQ ID NO: 4165 - protein, 24 aa, Homo sapiens
LVSVPYVGGNMEVNVYGAIMHEVR

SEQ ID NO: 4166 - protein, 15 aa, Homo sapiens
MEACMLNGTVIGPGK

SEQ ID NO: 4167 - protein, 16 aa, Homo sapiens
NSMVLDVAFVLEGSDK

SEQ ID NO: 4168 - protein, 24 aa, Homo sapiens
NSQWICSNEECPGECLVTGQSHFK

SEQ ID NO: 4169 - protein, 21 aa, Homo sapiens
NVSCPQLEVPVCPSGFQLSCK

SEQ ID NO: 4170 - protein, 34 aa, Homo sapiens
PGQTCQPILEEQCLVPDSSHCQVLLLPLFAECHK

SEQ ID NO: 4171 - protein, 29 aa, Homo sapiens
QNADQCCPEYECVCDPVSCDLPPVPHCER

SEQ ID NO: 4172 - protein, 15 aa, Homo sapiens
RDETLQDGCDTHFCK

SEQ ID NO: 4173 - protein, 24 aa, Homo sapiens
RLPGDIQVVPIGVGPNANVQELER

SEQ ID NO: 4174 - protein, 17 aa, Homo sapiens
RNSMVLDVAFVLEGSDK

SEQ ID NO: 4175 - protein, 26 aa, Homo sapiens
RPGDVWTLPDQCHTVTCQPDGQTLLK

SEQ ID NO: 4176 - protein, 16 aa, Homo sapiens
RPMKDETHFEVVESGR

SEQ ID NO: 4177 - protein, 13 aa, Homo sapiens
SEVEVDIHYCQGK

SEQ ID NO: 4178 - protein, 12 aa, Homo sapiens
SFSIIGDFQNGK

SEQ ID NO: 4179 - protein, 13 aa, Homo sapiens
SFSIIGDFQNGKR

SEQ ID NO: 4180 - protein, 15 aa, Homo sapiens
SGFTYVLHEGECCGR

SEQ ID NO: 4181 - protein, 28 aa, Homo sapiens
SLSYPDEECNEACLEGCFCPPGLYMDER

SEQ ID NO: 4182 - protein, 30 aa, Homo sapiens
STIYPVGQFWEEGCDVCTCTDMEDAVMGLR

SEQ ID NO: 4183 - protein, 20 aa, Homo sapiens
SVGSQWASPENPCLINECVR

SEQ ID NO: 4184 - protein, 12 aa, Homo sapiens
TATLCPQSCEER

SEQ ID NO: 4185 - protein, 29 aa, Homo sapiens
TCAQEGMVLYGWTDHSACSPVCPAGMEYR

SEQ ID NO: 4186 - protein, 26 aa, Homo sapiens
TCGLCGNYNGNQGDDFLTPSGLAEPR

SEQ ID NO: 4187 - protein, 26 aa, Homo sapiens
TCQNYDLECMSMGCVSGCLCPPGMVR

SEQ ID NO: 4188 - protein, 14 aa, Homo sapiens
TCQSLHINEMCQER

SEQ ID NO: 4189 - protein, 27 aa, Homo sapiens
TEPMQVALHCTNGSVVYHEVLNAMECK

SEQ ID NO: 4190 - protein, 21 aa, Homo sapiens
TLCECAGGLECACPALLEYAR

SEQ ID NO: 4191 - protein, 10 aa, Homo sapiens
TLVQEWTVQR

SEQ ID NO: 4192 - protein, 44 aa, Homo sapiens
TLVQEWTVQRPGQTCQPILEEQCLVPDSSHCQVLLLPLFAECHK

SEQ ID NO: 4193 - protein, 9 aa, Homo sapiens
TNGVCVDWR

SEQ ID NO: 4194 - protein, 8 aa, Homo sapiens
TNTGLALR

SEQ ID NO: 4195 - protein, 24 aa, Homo sapiens
TPDFCAMSCPPSLVYNHCEHGCPR

SEQ ID NO: 4196 - protein, 11 aa, Homo sapiens
TTCNPCPLGYK

SEQ ID NO: 4197 - protein, 11 aa, Homo sapiens
TVMIDVCTTCR

SEQ ID NO: 4198 - protein, 19 aa, Homo sapiens
TYGLCGICDENGANDFMLR

SEQ ID NO: 4199 - protein, 17 aa, Homo sapiens
VAVVEYHDGSHAYIGLK

SEQ ID NO: 4200 - protein, 35 aa, Homo sapiens
VCGLCGNFDGIQNNDLTSSNLQVEEDPVDFGNSWK

SEQ ID NO: 4201 - protein, 9 aa, Homo sapiens
VEDFGNAWK

SEQ ID NO: 4202 - protein, 15 aa, Homo sapiens
VIVIPVGIGPHANLK

SEQ ID NO: 4203 - protein, 10 aa, Homo sapiens
VKEEVFIQQR

SEQ ID NO: 4204 - protein, 33 aa, Homo sapiens
VLAPATFYAICQQDSCHQEQVCEVIASYAHLCR

SEQ ID NO: 4205 - protein, 46 aa, Homo sapiens
VMLEGSCVPEEACTQCIGEDGVQHQFLEAWVPDHQPCQICTCLSGR

SEQ ID NO: 4206 - protein, 16 aa, Homo sapiens
VPLDSSPATCHNNIMK

SEQ ID NO: 4207 - protein, 11 aa, Homo sapiens
VTGCPPFDEHK

SEQ ID NO: 4208 - protein, 20 aa, Homo sapiens
VTILVEGGEIELFDGEVNVK

SEQ ID NO: 4209 - protein, 11 aa, Homo sapiens
VTVFPIGIGDR

SEQ ID NO: 4210 - protein, 27 aa, Homo sapiens
WNCTDHVCDATCSTIGMAHYLTFDGLK

SEQ ID NO: 4211 - protein, 13 aa, Homo sapiens
WTCPCVCTGSSTR

SEQ ID NO: 4212 - protein, 14 aa, Homo sapiens
YAGSQVASTSEVLK

SEQ ID NO: 4213 - protein, 14 aa, Homo sapiens
YFTFSGICQYLLAR

SEQ ID NO: 4214 - protein, 8 aa, Homo sapiens
YIILLLGK

SEQ ID NO: 4215 - protein, 24 aa, Homo sapiens
YLFPGECQYVLVQDYCGSNPGTFR

SEQ ID NO: 4216 - protein, 14 aa, Homo sapiens
YLSDHSFLVSQGDR

SEQ ID NO: 4217 - protein, 34 aa, Homo sapiens
YLSDHSFLVSQGDREQAPNLVYMVTGNPASDEIK

SEQ ID NO: 4218 - protein, 36 aa, Homo sapiens
YNSCAPACQVTCQHPEPLACPVQCVEGCHAHCPPGK

SEQ ID NO: 4219 - protein, 9 aa, Homo sapiens
YTLFQIFSK

SEQ ID NO: 4220 - protein, 16 aa, Homo sapiens
CCSAGCATFCSLPNDK

SEQ ID NO: 4221 - protein, 14 aa, Homo sapiens
DQCQVDSQCPGQMK

SEQ ID NO: 4222 - protein, 18 aa, Homo sapiens
EGSCPQVNINFPQLGLCR

SEQ ID NO: 4223 - protein, 28 aa, Homo sapiens
TGVCPELQADQNCTQECVSDSECADNLK
